(19) United States
(12) Patent Application Publication
(10) Pub. No.: US 2021/0040463 A1
(43) Pub. Date: Feb. 11, 2021

(54) FUSION PROTEIN FOR REMODELING ANTIBODY GLYCOFORM

(71) Applicant: CHO PHARMA INC., Taipei City (TW)

(72) Inventors: Kuo-Ching CHU, Taipei City (TW); Lin-Ya HUANG, Taipei City (TW); Yi-Fang ZENG, Taipei City (TW)

(21) Appl. No.: 16/986,015

(22) Filed: Aug. 5, 2020

Related U.S. Application Data
(60) Provisional application No. 62/882,729, filed on Aug. 5, 2019.

(51) Int. Cl. C12N 9/24; C12N 15/52

(52) U.S. Cl. CPC C12N 9/2402; C12N 15/52; C07K 2319/00; C12Y 302/01127; C12Y 302/01051

(57) ABSTRACT

The present disclosure provides a fusion protein comprising a fucosidase or a truncated fragment or a mutant thereof fuses with either N-terminal end or C-terminal end of the endoglycosidase or a truncated fragment of mutant thereof. The present disclosure also provides a nucleic acid molecule expressing the fusion protein and a method for remodeling a glycan of an antibody Fc region.

[0001] This application claims the benefit and priority to U.S. Provisional Application No. 62/882,729, filed on Aug. 5, 2019, entitled, “Advanced Fucosidase for Cleaving Core-Fucose of Ab-Fc”, the contents of which is incorporated by reference herewith in its entirety.

### SEQUENCE LISTING

[0002] This instant application contains a Sequence Listing which has been submitted electronically in ASCII format and is hereby incorporated by reference in its entirety. Said ASCII copy, created on Aug. 5, 2020, is named G4590-09600US_SeqList.txt and is 1.573 megabytes in size.

### FIELD OF THE DISCLOSURE

[0003] The present disclosure relates to glycoform remodeling; particularly, to a fusion protein for remodeling antibody glycoform.

### BACKGROUND OF THE DISCLOSURE

[0004] Antibodies, also known as immunoglobulins (Ig), are glycoproteins that play a central role in immune responses. IgG antibodies and fragments of IgG antibodies have been developed as important bio-therapeutics for treating a diverse range of diseases. The constant (Fc) region of naturally-occurring antibodies is typically N-glycosylated. The particular glycosylation, i.e., glycoform, significantly affects Fc effector functions and stability of the antibodies. Thus, one approach to improve therapeutic efficacy of an antibody is to modify the glycoform in the Fc region.

[0005] The Fc glycoform typically includes a core fucose residue. In the case of cancer therapy, it has been reported that anti-tumor antibodies having glycoforms in the Fc region with lower levels of core fucose demonstrate higher binding affinity to CD16 (FcγRIIIA) on NK cells. The higher affinity results in an improved induction of antibody-dependent cellular cytotoxicity against tumor cells.

[0006] To produce antibodies with a low level of core fucose, several strategies have been developed. For example, an inhibitor of fucosyltransferase, which is necessary for core fucose addition, can be added to the culture medium used for growing antibody producing cells. In another example, antibody producing cells can be genetically engineered to lack fucosyltransferase activity.

[0007] In a different strategy, purified enzymes can be used in vitro to directly modify the antibody glycoform in a predictable way. One advantage of this strategy is that antibodies can be produced and then modified to have well-defined low core fucose Fc glycoforms with desirable biological properties. This would facilitate the use of high-yielding non-mammalian expression systems to produce antibodies instead of mammalian expression systems, which are typically employed to ensure proper core glycosylation. US 20190185898 provides for fucosidase mutants that serve as fuco-ligases for core fucosylation of a range of biological glycopeptides and glycoproteins including intact therapeutic antibodies.

[0008] Yet, existing fucosidase enzymes are inefficient at cleaving core fucose from the Fc region. The need exists to develop enzymes that can efficiently and predictably remodel antibody glycoform.

### SUMMARY OF THE DISCLOSURE

[0009] A fusion protein is provided in the disclosure. The assembly of multiple enzymes in a fusion protein facilitates enzyme synergism and exhibits advantageous effect of remodeling antibody glycoform predictably.

[0010] In one aspect, the present disclosure provides a fusion protein comprising a fucosidase or a truncated fragment or a mutant thereof fuses with either N-terminal end or C-terminal end of the endoglycosidase or a truncated fragment or a mutant thereof; wherein the fusion protein exhibit both the fucosidase activity and the endoglycosidase activity.

[0011] Certain embodiments of the fucosidase include, but are not limited to, Lactobacillus casei α-L fucosidase C (Alfc), Bacteroides fragilis fucosidase (BF3242), Bacteroides thetaiotamicron α-L-fucosidase (BT2970), Emticicia oligotrophica α-L-fucosidase (E00918) and Elizabethkingia miricola α-(1-6) fucosidase (Emfuc3), or a fragment thereof, or a mutant thereof. In some embodiments, the fucosidase is Lactobacillus casei α-L fucosidase C, Elizabethkingia miricola α-(1-6) fucosidase (Emfuc3), or a truncated fragment thereof, or a mutant thereof.

[0012] Certain embodiments of the endoglycosidase include, but are not limited to, Streptococcus pyogenes endoglycosidase S, Streptococcus pyogenes endoglycosidase S2 or a fragment or a mutant thereof. Particularly, the endoglycosidase is Streptococcus pyogenes endoglycosidase S2, or a truncated fragment or a mutant thereof.

[0013] In one embodiment, the fucosidase or endoglycosidase is a truncated fragment. Truncated fragment of endoglycosidase is the IgG binding domain thereof. In some embodiments, the truncated fragment of the endoglycosidase is an IgG binding domain of Streptococcus pyogenes endoglycosidase S or Streptococcus pyogenes endoglycosidase S2.

[0014] In one embodiment, the fucosidase or endoglycosidase is a mutant polypeptide. Particularly, the endoglycosidase mutant is Streptococcus pyogenes endoglycosidase S having a mutation at amino acid position −D233, preferably −D233Q. In some embodiments, the endoglycosidase mutant is Streptococcus pyogenes endoglycosidase S2 having a mutation at amino acid position T138, D182, D184, D186, D226, or T227; preferably having a T138E, T138M, T138Q, T138R, T138M, T138L, T138H, T138N, T138K, D182Q, D184M, D184Q, D184T, D184L, D184F, D184S, D184V, D184K, D184W, E186A, D226Q, or T227Q.

[0015] Certain embodiments of the fusion protein include, but are not limited to, Lactobacillus casei α-L fucosidase C fused with Streptococcus pyogenes endoglycosidase S, Streptococcus pyogenes endoglycosidase S2, an IgG binding domain of Streptococcus pyogenes endoglycosidase S, an IgG binding domain of Streptococcus pyogenes endoglycosidase S2, Streptococcus pyogenes endoglycosidase S having a mutation at amino acid position D233, Streptococcus pyogenes endoglycosidase S2 having a mutation at amino acid position T138, Streptococcus pyogenes endoglycosidase S2 having a mutation at amino acid position D182, Streptococcus pyogenes endoglycosidase S2 having a mutation at amino acid position D184, Streptococcus pyogenes endoglycosidase S2 having a mutation at amino acid position D186, Streptococcus pyogenes endoglycosidase S2 having a mutation at amino acid position D226, or Streptococcus pyogenes endoglycosidase S2 having a mutation at amino acid position T227.

[0016] Particularly, the fusion protein comprises an amino acid sequence selected from the group consisting of: SEQ ID NOs: 2, 4, 6, 8, 10, 12, 14, 16, 18, 20, 22, 24, 26, 28, 30, 32, 34, 36, 38, 40, 42, 44, 46, 48, 50, 52, 54, 56, 58, 60, 62, 64, 66, 68, 70, 72, 74, 76, 78, 80, 82, 84, 86, 88, 90, 92, 94, 96, 98, 100, 102, 104, 106, 108, 110, 112, 114, 116, 118, 120, 122, 124, 126, 128, 130, 132, 134, 136, 138, 140, 142, 144, 146, 148, 150, 152, 154, 156, 158, 160, 162, 164, 166, 168, 170, 172, 174, 176, 178, 180, 182, 184, 186, 188, 190, 192, 194, 196, 198, 200, 202, and 204, or a substantially similar sequence thereof. Preferably, the fusion protein has the amino acid sequence selected from the group consisting of SEQ ID NOs: 34, 36, 38, 40, 42, 44, 46, 48, 50, 52, 54, 56, 58, 60, 62, 64, 66, 68, 70, 72, 74, 76, 78, 80, 82, 84, 86, 88, 90, 92, 94, 96, 98, 100, 102, 104, 106, 108, 174, 176, 178, 180, 182, 184, 186, 188, 190, 192, 194, 196, 198, 200, 202, and 204, or a substantially similar sequence thereof.

[0017] In another aspect, the present disclosure provides a nucleic acid molecule expressing the fusion protein as described herein. Certain embodiments of the nucleic acid include, but are not limited to, SEQ ID NOs: 1, 3, 5, 7, 9, 11, 13, 15, 17, 19, 21, 23, 25, 27, 29, 31, 33, 35, 37, 39, 41, 43, 45, 47, 49, 51, 53, 55, 57, 59, 61, 63, 65, 67, 69, 71, 73, 75, 77, 79, 81, 83, 85, 87, 89, 91, 93, 95, 97, 99, 101, 103, 105, 107, 109, 111, 113, 115, 117, 119, 121, 123, 125, 127, 129, 131, 133, 135, 137, 139, 141, 143, 145, 147, 149, 151, 153, 155, 157, 159, 161, 163, 165, 167, 169, 171, 173, 175, 177, 179, 181, 183, 185, 187, 189, 191, 193, 195, 197, 199, 201, and 203, or a substantially identical sequence thereof. In some further embodiments, the nucleic acid has the nucleotide sequence selected from the group consisting of SEQ ID NOs: 33, 35, 37, 39, 41, 43, 45, 47, 49, 51, 53, 55, 57, 59, 61, 63, 65, 67, 69, 71, 73, 75, 77, 79, 81, 83, 85, 87, 89, 91, 93, 95, 97, 99, 101, 103, 105, 107, 173, 175, 177, 179, 181, 183, 185, 187, 189, 191, 193, 195, 197, 199, 201, and 203, or a substantial identical sequence thereof.

[0018] In another aspect, the present disclosure provides a vector comprising the nucleic acid of the present disclosure. The present disclosure also provides a host cell comprising the vector.

[0019] In a further aspect, the present disclosure provides a method for remodeling a glycan of a Fc region of an antibody comprising the following steps: obtaining an antibody that has a heterogeneous glycan in the Fc region of the antibody and contacting the antibody with the fusion protein as described herein. Particularly, the method comprises providing an antibody having a heterogeneous glycan in the Fc region thereof, a fusion protein as described herein and a target glycan oxazoline, wherein the glycan of the antibody Fc region comprises a N-acetylglucosamine (GlcNAc) residue; and contacting the antibody with the fusion protein and the target glycan oxazoline linking to the antibody Fc region; whereby a remodeled glycan of the antibody Fc region can be obtained.

[0020] In one embodiment of the disclosure, the method further comprises purifying the antibody having the remodeled glycan in the Fc region.

[0021] The present disclosure is described in detail in the following sections. Other characteristics, purposes and advantages of the present disclosure can be found in the detailed description and claims.

### BRIEF DESCRIPTION OF THE DRAWINGS

[0022] FIG. 1 shows a bar graph showing percentage of fucose hydrolysis by the indicated enzymes, i.e., fucosidases, and fucosidase/EndoS2 fusion proteins, expressed as percentage of starting fucose removed. The enzymes are identified in Tables 1 to 5 below.

[0023] FIG. 2 shows a bar graph showing percentage of fucose hydrolysis by Alfc fucosidase or Alfc/EndoS2 fusion proteins expressed as percentage of starting fucose removed. The fusion proteins are identified in Tables 1 to 5 below.

[0024] FIG. 3 shows a bar graph showing percentage of fucose hydrolysis by Alfc fucosidase or fusion proteins of five fucosidases with truncated EndoS2 expressed as percentage of starting fucose removed. The fusion proteins are identified in Tables 1 to 5 below.

[0025] FIG. 4 shows a bar graph showing percentage of fucose hydrolysis by Alfc or Emfuc3 fucosidase or Alfc or Emfuc3/EndoS2 fusion proteins expressed as percentage of starting fucose removed. The fusion proteins are identified in Tables 1 to 5 below.

[0026] FIG. 5 shows a bar graph showing percentage of fucose hydrolysis by Alfc or Emfuc3 fucosidase, Alfc/EndoS or EndoS or EndoS2/Emfuc3 fusion proteins expressed as percentage of starting fucose removed. The fusion proteins are identified in Tables 1 to 5 below.

[0027] FIG. 6 shows a bar graph showing percentage of fucose hydrolysis by Alfc, Emfuc3 or BF3242 fucosidase, EndoS or EndoS2/Emfuc3 or EndoS/BF3242 fusion proteins expressed as percentage of starting fucose removed. The fusion proteins are identified in Tables 1 to 5 below.

[0028] FIG. 7 shows a bar graph showing percentage of fucose hydrolysis by BF3242 fucosidase, EndoS or EndoS2/BF3242 fusion proteins expressed as percentage of starting fucose removed. The fusion proteins are identified in Tables 1 to 5 below.

[0029] FIG. 8A shows SDS-PAGE analysis of the time course of glycan remodeling of trastuzumab (TRZ) by C-C401. The two native glycans are removed and each replaced by Sia₂(α2-6)Gal₂GlcNAc₂Man₃GlcNAc₂ (G2S2). Lane 2: Standard of TRZ. Lane 3: Standard of TRZ-N/N (TRZ containing two GlcNAc). Lane 4: Treating TRZ with C-C401 for 20 hours to obtain TRZ-N/N. Lanes 5-7: 95%, 98%, and 98% glycosylation of TRZ-N/N with SCT-oxazoline by C-C401 for 10, 20, and 30 minutes, respectively. Lane 8: Purified glyco-engineered TRZ (TRZ-G2S2/G2S2).

[0030] FIG. 8B shows SDS-PAGE analysis of glycan remodeling of TRZ by C-C401. The two native glycans are removed and each replaced by Gal₂GlcNAc₂Man₃GlcNAc₂ (G2). Lane 2: Standard of trastuzumab. Lane 3: Treating TRZ with C-C401 for 16 hours to obtain TRZ-N/N. Lanes 4-7: 98% glycosylation of TRZ-N/N with CT-oxazoline by C-C401 for 15, 30, 45, and 60 minutes. Lane 8: Purified glyco-engineered TRZ (TRZ-G2/G2). Lane 9: Standard of TRZ-G2S2/G2S2.

[0031] FIG. 9 shows SDS-PAGE analysis of glycan remodeling of rituximab (RTX) by C-C401. Lane 2: Standard of trastuzumab. Lane 3: Standard of TRZ-N/N. Lane 4: Standard of rituximab. Lane 5: Treating RTX with C-C401 for 20 hours to obtain RTX-N/N. Lanes 6-8: 95%, 98%, and 98% glycosylation of RTX-N/N with SCT-oxazoline by C-C401. Lane 9: Purified glyco-engineered RTX (RTX-G2S2/G2S2).

[0032] FIG. 10 shows SDS-PAGE analysis of glycan remodeling of TRZ by C-C406. Lane 2: Standard of trastuzumab. Lane 3: Standard of TRZ-N/N. Lane 4: Treating TRZ with C-C406 for 16 hours to obtain TRZ-N/N. Lanes 5-8: 90%, 95%, 98%, and 98% glycosylation of TRZ-N/N with SCT-oxazoline by C-C406 for 30, 60, 90, and 120 minutes respectively. Lane 9: Purified glyco-engineered TRZ (TRZ-G2S2/G2S2).

[0033] FIG. 11 shows SDS-PAGE analysis of glycan remodeling of TRZ by C-C407. Lane 2: Standard of trastuzumab. Lane 3: Standard of TRZ-N/N. Lanes 4-7: 80%, 95%, 98%, and 98% glycosylation of TRZ-N/N with SCT-oxazoline by C-C407 for 30, 60, 90, and 120 minutes, respectively. Lane 8: Treating TRZ with C-C407 for 12 hours to obtain TRZ-N/N. Lane 9: Purified glyco-engineered TRZ (TRZ-G2S2/G2S2).

[0034] FIG. 12 shows SDS-PAGE analysis of glycan remodeling of TRZ by C-C204. Lane 2: Standard of trastuzumab. Lane 3: Treating TRZ with C-C204 for 16 hours to obtain TRZ-N/N. Lane 4-9: 85%, 97%, 98%, 98%, 97%, and 90% glycosylation of TRZ-N/N with SCT-oxazoline by C-C204 for 15, 30, 45, 60, 90, 120, and 240 minutes, respectively. Lane 10: Purified glyco-engineered TRZ (TRZ-G2S2/G2S2).

### DETAILED DESCRIPTION OF THE DISCLOSURE

[0035] The Fc domain of all IgGs possesses a conserved N-glycosylation site to which a biantennary complex-type glycan is typically attached, but significant structural heterogeneity arises from terminal and core modifications. Certain glycoforms of a human antibody exhibit improved therapeutic effects while others possess undesired properties. Therefore, the ability to control the glycosylation process plays a crucial role to obtain antibodies comprising desired glycoform(s) so as to improve their therapeutic efficacy. The present disclosure provides a fusion protein comprising a plurality of enzymes for remodeling antibody glycoforms, following which a glycopeptide having a glycosylation pattern suitable for therapeutic use in a mammal can be generated.

[0036] The practice of the present invention will employ, unless otherwise indicated, conventional techniques of molecular biology, microbiology, recombinant DNA, and immunology, which are within the skill of the art. Such techniques are explained fully in the literature. See, for example, Molecular Cloning A Laboratory Manual, 2nd Ed., ed. by Sambrook, Fritsch and Maniatis (Cold Spring Harbor Laboratory Press, 1989); DNA Cloning, Volumes I and II (D. N. Glover ed., 1985); Culture Of Animal Cells (R. I. Freshney, Alan R. Liss, Inc., 1987); Immobilized Cells And Enzymes (IRL Press, 1986); B. Perbal, A Practical Guide To Molecular Cloning (1984); the treatise, Methods In Enzymology (Academic Press, Inc., N.Y.); Gene Transfer Vectors For Mammalian Cells (J. H. Miller and M. P. Calos eds., 1987, Cold Spring Harbor Laboratory); Methods In Enzymology, Vols. 154 and 155 (Wu et al. eds.), Immunochemical Methods In Cell And Molecular Biology (Mayer and Walker, eds., Academic Press, London, 1987); Antibodies: A Laboratory Manual, by Harlow and Lane s (Cold Spring Harbor Laboratory Press, 1988); and Handbook Of Experimental Immunology, Volumes I-IV (D. M. Weir and C. C. Blackwell, eds., 1986).

### Definitions

[0037] The present disclosure can be more readily understood by reference to the following detailed description of various embodiments of the disclosure, the examples, and the drawings and tables with their relevant descriptions. It is to be understood that unless otherwise specifically indicated by the claims, the disclosure is not limited to specific preparation methods, carriers or formulations, or to particular modes of formulating the extract of the disclosure into products or compositions intended for topical, oral or parenteral administration, because as one of ordinary skill in the relevant arts is well aware, such things can, of course, vary. It is also to be understood that the terminology used herein is for the purpose of describing particular embodiments only and is not intended to be limiting.

[0038] As utilized in accordance with the present disclosure, the following terms, unless otherwise indicated, shall be understood to have the following meaning.

[0039] It must be noted that, as used in the specification and the appended claims, the singular forms “a,” “an” and “the” include plural referents unless the context clearly dictates otherwise. Thus, unless otherwise required by context, singular terms shall include the plural and plural terms shall include the singular.

[0040] As used herein, the term “optional” or “optionally” means that the subsequently described event or circumstance may or may not occur, and that the description includes instances where the said event or circumstance occurs and instances where it does not. For example, the phrase “optionally comprising an agent” means that the agent may or may not exist.

[0041] As used herein, the term “glycan” refers to a polysaccharide, or oligosaccharide. Glycan is also used herein to refer to the carbohydrate portion of a glycoconjugate, such as a glycoprotein, glycolipid, glycopeptide, glycoproteome, peptidoglycan, lipopolysaccharide or a proteoglycan. Glycans usually consist solely of 0-glycosidic linkages between monosaccharides. For example, cellulose is a glycan (or more specifically a glucan) composed of -1,4-linked D-glucose, and chitin is a glycan composed of -1,4-linked N-acetyl-D-glucosamine. Glycans can be homo or heteropolymers of monosaccharide residues, and can be linear or branched. Glycans can be found attached to proteins as in glycoproteins and proteoglycans. They are generally found on the exterior surface of cells. 0- and N-linked glycans are very common in eukaryotes but may also be found, although less commonly, in prokaryotes. N-Linked glycans are found attached to the R-group nitrogen (N) of asparagine in the sequon. The sequon is a Asn-X-Ser or Asn-X-Thr sequence, where X is any amino acid except praline.

[0042] As used herein, the term “engineered” describes a polypeptide whose amino acid sequence has been designed by man and/or whose existence and production require human intervention and/or activity.

[0043] As used herein, the term “polynucleotide,” or “nucleic acid,” as used interchangeably herein, refer to polymers of nucleotides of any length, and include DNA and RNA. The nucleotides can be deoxyribonucleotides, ribonucleotides, modified nucleotides or bases, and/or their analogs, or any substrate that can be incorporated into a polymer by DNA or RNA polymerase, or by a synthetic reaction. A polynucleotide may comprise modified nucleotides, such as methylated nucleotides and their analogs. If present, modification to the nucleotide structure may be imparted before or after assembly of the polymer. The sequence of nucleotides may be interrupted by non-nucleotide components. A polynucleotide may be further modified after synthesis, such as by conjugation with a label. Other types of modifications include, for example, “caps,” substitution of one or more of the naturally occurring nucleotides with an analog, internucleotide modifications such as, for example, those with uncharged linkages (e.g., methyl phosphonates, phosphotriesters, phosphoamidates, carbamates, etc.) and with charged linkages (e.g., phosphorothioates, phosphorodithioates, etc.), those containing pendant moieties, such as, for example, proteins (e.g., nucleases, toxins, antibodies, signal peptides, ply-L-lysine, etc.), those with intercalators (e.g., acridine, psoralen, etc.), those containing chelators (e.g., metals, radioactive metals, boron, oxidative metals, etc.), those containing alkylators, those with modified linkages (e.g., alpha anomeric nucleic acids, etc.), as well as unmodified forms of the polynucleotides(s). Further, any of the hydroxyl groups ordinarily present in the sugars may be replaced, for example, by phosphonate groups, phosphate groups, protected by standard protecting groups, or activated to prepare additional linkages to additional nucleotides, or may be conjugated to solid or semi-solid supports. The 5′ and 3′ terminal OH can be phosphorylated or substituted with amines or organic capping group moieties of from 1 to 20 carbon atoms. Other hydroxyls may also be derivatized to standard protecting groups. Polynucleotides can also contain analogous forms of ribose or deoxyribose sugars that are generally known in the art, including, for example, 2′-O-methyl-, 2′-O-allyl, 2′-fluoro- or 2′-azido-ribose, carbocyclic sugar analogs, .alpha.-anomeric sugars, epimeric sugars such as arabinose, xyloses or lyxoses, pyranose sugars, furanose sugars, sedoheptuloses, acyclic analogs and basic nucleoside analogs such as methyl riboside. One or more phosphodiester linkages may be replaced by alternative linking groups. These alternative linking groups include, but are not limited to, embodiments wherein phosphate is replaced by P(O)S (“thioate”), P(S)S (“dithioate”), “(O)NR₂ (“amidate”), P(O)R, P(O)OR′, CO or CH₂ (“formacetal”), in which each R or R′ is independently H or substituted or unsubstituted alkyl (1-20 C) optionally containing an ether (—O—) linkage, aryl, alkenyl, cycloalkyl, cycloalkenyl or araldyl. Not all linkages in a polynucleotide need be identical. The preceding description applies to all polynucleotides referred to herein, including RNA and DNA.

[0044] As used herein, the term “vector” refers to a nucleic acid molecule capable of transporting another nucleic acid to which it has been linked.

[0045] As used herein, the term “host” refers to a system (e.g., a cell, organism, etc.) in which a polypeptide of interest is present. In some embodiments, a host is a system that is susceptible to infection with a particular infectious agent. In some embodiments, a host is a system that expresses a particular polypeptide of interest.

[0046] As used herein, the term “amino acid” refers to naturally occurring and synthetic amino acids, as well as amino acid analogs and amino acid mimetics that function in a manner similar to the naturally occurring amino acids. Naturally occurring amino acids are those encoded by the genetic code, as well as those amino acids that are later modified, e.g., hydroxyproline, (-carboxyglutamate, and O-phosphoserine. Amino acid analogs refers to compounds that have the same basic chemical structure as a naturally occurring amino acid, i.e., an .alpha. carbon that is linked to a hydrogen, a carboxyl group, an amino group, and an R group, e.g., homoserine, norleucine, methionine sulfoxide, methionine methyl sulfonium. Such analogs have modified R groups (e.g., norleucine) or modified peptide backbones, but retain the same basic chemical structure as a naturally occurring amino acid. Amino acid mimetics refers to chemical compounds that have a structure that is different from the general chemical structure of an amino acid, but that function in a manner similar to a naturally occurring amino acid.

[0047] As used herein, the term “polypeptide,” “peptide” and “protein,” as used interchangeably herein, can be used refers to a polymer in which the monomers are amino acids and are joined together through amide bonds, alternatively referred to as a peptide. Additionally, unnatural amino acids, for example, beta-alanine, phenylglycine and homoarginine are also included. Amino acids that are not nucleic acid-encoded may also be used in the present invention. Furthermore, amino acids that have been modified to include reactive groups, glycosylation sites, polymers, therapeutic moieties, biomolecules and the like may also be used in the invention. All of the amino acids used in the present invention may be either the D- or L-isomer thereof. The L-isomer is generally preferred. In addition, other peptidomimetics are also useful in the present invention. As used herein, a “peptide” is an oligopeptide, polypeptide, peptide, protein or glycoprotein. As used herein, “polypeptide” refers to both glycosylated and unglycosylated peptides. Also included are peptides that are incompletely glycosylated by a system that expresses the peptide.

[0048] As used herein, the term “a fusion protein,” also known as “a chimeric protein,” refers to a protein that is translated from the joining of two or more genes that originally coded for separate proteins.

[0049] As used herein, the term “antibody”, as used herein, also includes an antigen-binding fragment of a full antibody molecule. An antigen-binding fragment of an antibody may be derived, e.g., from full antibody molecules using any suitable standard techniques such as proteolytic digestion or recombinant genetic engineering techniques involving the manipulation and expression of DNA encoding antibody variable and optionally constant domains. Such DNA is known and/or is readily available from, e.g., commercial sources, DNA libraries (including, e.g., phage-antibody libraries), or can be synthesized. The DNA may be sequenced and manipulated chemically or by using molecular biology techniques, for example, to arrange one or more variable and/or constant domains into a suitable configuration, or to introduce codons, create cysteine residues, modify, add or delete amino acids, etc.

[0050] As used herein, the term “an antibody Fc region” refers to a fragment crystallizable region, which is the tail region of an antibody that interacts with cell surface receptors called Fc receptors and some proteins of the complement system. Glycosylation of the Fc fragment is essential for Fc receptor-mediated activity.

[0051] As used herein, the term “glycoform” refers to an antibody comprising a particular glycosylation state. The term “glycosylation state” refers to an antibody having a specific or desired glycosylation pattern.

[0052] As used herein, the term “remodeling a glycan of an antibody Fc region” refers to changing or modifying the type, position, number, form, or linkage of residues in the glycan of the antibody Fc region. In one embodiment, the remodeling is lowering the number or length of core fucose.

[0053] As used herein, the term “a target glycan oxazoline” refers to a glycan oxazoline which is the glycoform to be remodeled.

[0054] Fusion Proteins

[0055] Glycosylation pathway engineering has been developed to improve the biological function and reduce the heterogenecity of therapeutic antibodies. The way to acquire homogeneous glycoproteins is based on the strategy of glycoprotein remodeling. Fucosidases are able to catalyze the hydrolysis of an α-L fucoside. For example, the hydrolysis of the α-L fucoside involves the chemical reaction of cleaving the 1,2-linkage, 1,3-linkage, or 1,6-linkage between α-L-fucose and N-acetylglucosamine residue. On the other hand, endoglycosidases catalyze the release of oligosaccharides from glycoproteins or glycolipids. For example, the release of oligosaccharides from glycoproteins is performed by hydrolyzing the β-1,4-di-N-acetylchitobiose core of the asparagine-linked glycan or hydrolyzing the endo-β-N-acetylglucosaminide on all N-linked glycans and on biantennary and sialylated glycans of AGP (α1-acid glycoprotein). Fucosidases and endoglycosidases in combination to treat antibody glycoforms can obtain homogeneous antibodies with a well-defined glycan at the Fc region.

[0056] The present disclosure provides a fusion protein comprising a fucosidase or a truncated fragment or a mutant thereof fuses with either N-terminal end or C-terminal end of the endoglycosidase or a truncated fragment or a mutant thereof; wherein the fusion protein exhibits both the fucosidase activity and the endoglycosidase activity.

[0057] The fucosidase or a truncated fragment of mutant thereof and the endoglycosidase or a truncated fragment or a mutant thereof are fused together directly or through a linker. In one embodiment, the fucosidase or a truncated fragment or a mutant thereof directly or indirectly links to the N-terminal of the endoglycosidase or a truncated fragment or a mutant thereof. In another embodiment, the fucosidase or a truncated fragment or a mutant thereof directly or indirectly links to the C-terminal of the endoglycosidase or a truncated fragment or a mutant thereof.

[0058] Fucosidase can be in a wild type form or a modified form compared to its wild-type form, such as a truncated fragment or a mutant thereof. Examples of the fucosidase include but are not limited to Lactobacillus casei α-L fucosidase C (Alfc), Bacteroides fragilis fucosidase (BF3242), Bacteroides thetaiotamicron α-L-fucosidase (BT2970), Emticicia oligotrophica α-L-fucosidase (E00918) and Elizabethkingia miricola α-(1-6) fucosidase (Emfuc3), or a fragment thereof, or a mutant thereof. In some embodiments, the fucosidase is Lactobacillus casei α-L fucosidase C and Elizabethkingia miricola α-(1-6) fucosidase (Emfuc3), and a truncated fragment or a mutant thereof.

[0059] Endoglycosidase can be in a wild type form or a modified form compared to its wild-type form, such as a truncated fragment or mutant of an endoglycosidase. Examples of the endoglycosidase include but are not limited to Streptococcus pyogenes endoglycosidase S, Streptococcus pyogenes endoglycosidase S2 or a fragment or a mutant thereof. In some embodiments, the endoglycosidase is Streptococcus pyogenes endoglycosidase S2, or a truncated fragment or a mutant thereof.

[0060] Truncated fragments of fucosidase or endoglycosidase can also be used in the present disclosure. The truncated fragments of fucosidase or endoglycosidase have been truncated at either the N-terminal end of the peptide, the C-terminal end of the peptide or at both ends, or an internal region of the peptide. In some embodiments, the truncated fragment of fucosidase or endoglycosidase is a C-terminal or N-terminal truncated fragment thereof. In one embodiment, the truncated fragment of endoglycosidase is the IgG binding domain thereof. In some further embodiments, the truncated fragment of the endoglycosidase is an IgG binding domain of Streptococcus pyogenes endoglycosidase S or Streptococcus pyogenes endoglycosidase S2.

[0061] The fucosidase or endoglycosidase can be a mutant form thereof. In one embodiment, the endoglycosidase mutant is Streptococcus pyogenes endoglycosidase S having a mutation at amino acid position −D233; preferably, having a mutation at amino acid position D233Q. In some embodiments, the endoglycosidase mutant is Streptococcus pyogenes endoglycosidase S2 having a mutation at amino acid position: T138, D182, D184, D186, D226, or T227; preferably having a T138E, T138M, T138Q, T138R, T138 M, T138L, T138H, T138N, T138K, D182Q, D184M, D184Q, D184T, D184L, D184F, D184S, D184V, D184K, D184W, E186A, D226Q, or T227Q.

[0062] In some embodiments, the fusion protein comprises Lactobacillus casei α-L fucosidase C fused with Streptococcus pyogenes endoglycosidase S, Streptococcus pyogenes endoglycosidase S2, an IgG binding domain of Streptococcus pyogenes endoglycosidase S, an IgG binding domain of Streptococcus pyogenes endoglycosidase S2, Streptococcus pyogenes endoglycosidase S having a mutation at amino acid position D233, Streptococcus pyogenes endoglycosidase S2 having a mutation at amino acid position T138, Streptococcus pyogenes endoglycosidase S2 having a mutation at amino acid position D182, Streptococcus pyogenes endoglycosidase S2 having a mutation at amino acid position D184, Streptococcus pyogenes endoglycosidase S2 having a mutation at amino acid position D186, Streptococcus pyogenes endoglycosidase S2 having a mutation at amino acid position D226, or Streptococcus pyogenes endoglycosidase S2 having a mutation at amino acid position T227.

[0063] In some embodiments, the fusion protein comprises Elizabethkingia miricola α-(1-6) fucosidase fused with Streptococcus pyogenes endoglycosidase S, Streptococcus pyogenes endoglycosidase S2, an IgG binding domain of Streptococcus pyogenes endoglycosidase S, an IgG binding domain of Streptococcus pyogenes endoglycosidase S2, Streptococcus pyogenes endoglycosidase S having a mutation at amino acid position D233, Streptococcus pyogenes endoglycosidase S2 having a mutation at amino acid position T138, Streptococcus pyogenes endoglycosidase S2 having a mutation at amino acid position D182, Streptococcus pyogenes endoglycosidase S2 having a mutation at amino acid position D184, Streptococcus pyogenes endoglycosidase S2 having a mutation at amino acid position D186, Streptococcus pyogenes endoglycosidase S2 having a mutation at amino acid position D226 or Streptococcus pyogenes endoglycosidase S2 having a mutation at amino acid position T227.

[0064] Examples of the amino acid sequence of the fusion protein include but are not limited to SEQ ID NOs: 2, 4, 6, 8, 10, 12, 14, 16, 18, 20, 22, 24, 26, 28, 30, 32, 34, 36, 38, 40, 42, 44, 46, 48, 50, 52, 54, 56, 58, 60, 62, 64, 66, 68, 70, 72, 74, 76, 78, 80, 82, 84, 86, 88, 90, 92, 94, 96, 98, 100, 102, 104, 106, 108, 110, 112, 114, 116, 118, 120, 122, 124, 126, 128, 130, 132, 134, 136, 138, 140, 142, 144, 146, 148, 150, 152, 154, 156, 158, 160, 162, 164, 166, 168, 170, 172, 174, 176, 178, 180, 182, 184, 186, 188, 190, 192, 194, 196, 198, 200, 202, and 204, or a substantially similar sequence thereof. Preferably, the fusion protein has the amino acid sequence selected from the group consisting of SEQ ID NOs: 34, 36, 38, 40, 42, 44, 46, 48, 50, 52, 54, 56, 58, 60, 62, 64, 66, 68, 70, 72, 74, 76, 78, 80, 82, 84, 86, 88, 90, 92, 94, 96, 98, 100, 102, 104, 106, 108, 174, 176, 178, 180, 182, 184, 186, 188, 190, 192, 194, 196, 198, 200, 202, and 204, or a substantially similar sequence thereof.

[0065] As applied to polypeptides, the term “substantial similarity” or “substantially similar” applied to polypeptides means that two peptide sequences, when optimally aligned, such as by the programs GAP or BESTFIT using default gap weights, share at least 95% sequence identity, even more preferably at least 98% or 99% sequence identity. Preferably, residue positions which are not identical differ by conservative amino acid substitutions. A “conservative amino acid substitution” is one in which an amino acid residue is substituted by another amino acid residue having a side chain (R group) with similar chemical properties (e.g., charge or hydrophobicity). In general, a conservative amino acid substitution will not substantially change the functional properties of a protein. In cases where two or more amino acid sequences differ from each other by conservative substitutions, the percent sequence identity or degree of similarity may be adjusted upwards to correct for the conservative nature of the substitution. Means for making this adjustment are well-known to those of skill in the art. Examples of groups of amino acids that have side chains with similar chemical properties include (1) aliphatic side chains: glycine, alanine, valine, leucine and isoleucine; (2) aliphatic-hydroxyl side chains: serine and threonine; (3) amide-containing side chains: asparagine and glutamine; (4) aromatic side chains: phenylalanine, tyrosine, and tryptophan; (5) basic side chains: lysine, arginine, and histidine; (6) acidic side chains: aspartate and glutamate, and (7) sulfur-containing side chains are cysteine and methionine. Preferred conservative amino acids substitution groups are: valine-leucine-isoleucine, phenylalanine-tyrosine, lysine-arginine, alanine-valine, glutamate-aspartate, and asparagine-glutamine.

[0066] Mutations may be a substitution, deletion, or insertion of one or more codons encoding the antibody or polypeptide that results in a change in the amino acid sequence as compared with the native sequence antibody or polypeptide. Standard techniques known to those of skill in the art can be used to introduce mutations in the nucleotide sequence encoding a molecule provided herein, including, for example, site-directed mutagenesis and PCR-mediated mutagenesis which results in amino acid substitutions. Insertions or deletions may optionally be in the range of about 1 to 5 amino acids. In certain embodiments, the substitution, deletion, or insertion includes fewer than 25 amino acid substitutions, fewer than 20 amino acid substitutions, fewer than 15 amino acid substitutions, fewer than 10 amino acid substitutions, fewer than 5 amino acid substitutions, fewer than 4 amino acid substitutions, fewer than 3 amino acid substitutions, or fewer than 2 amino acid substitutions relative to the original molecule. The variation allowed may be determined by systematically making insertions, deletions, or substitutions of amino acids in the sequence and testing the resulting variants for activity exhibited by the full-length or mature native sequence.

[0067] Amino acid sequence insertions include amino- and/or carboxyl-terminal fusions ranging in length from one residue to polypeptides containing a hundred or more residues, as well as intrasequence insertions of single or multiple amino acid residues. Examples of terminal insertions include an antibody with an N-terminal methionyl residue. Other insertional variants of the antibody molecule include the fusion to the N- or C-terminus of the antibody to an enzyme (e.g., for antibody-directed enzyme prodrug therapy) or a polypeptide which increases the serum half-life of the antibody.

[0068] A conservative amino acid substitution is one in which the amino acid residue is replaced with an amino acid residue having a side chain with a similar charge. Families of amino acid residues having side chains with similar charges have been defined in the art. These families include amino acids with basic side chains (e.g., lysine, arginine, histidine), acidic side chains (e.g., aspartic acid, glutamic acid), uncharged polar side chains (e.g., glycine, asparagine, glutamine, serine, threonine, tyrosine, cysteine), nonpolar side chains (e.g., alanine, valine, leucine, isoleucine, proline, phenylalanine, methionine, tryptophan), beta-branched side chains (e.g., threonine, valine, isoleucine) and aromatic side chains (e.g., tyrosine, phenylalanine, tryptophan, histidine). Alternatively, mutations can be introduced randomly along all or part of the coding sequence, such as by saturation mutagenesis, and the resultant mutants can be screened for biological activity to identify mutants that retain activity. Following mutagenesis, the encoded protein can be expressed and the activity of the protein can be determined.

[0069] Substantial modifications in the biological properties of the antibody are accomplished by selecting substitutions that differ significantly in their effect on maintaining (a) the structure of the polypeptide backbone in the area of the substitution, for example, as a sheet or helical conformation, (b) the charge or hydrophobicity of the molecule at the target site, or (c) the bulk of the side chain.

[0070] Non-conservative substitutions entail exchanging a member of one of these classes for another class. Such substituted residues also may be introduced into the conservative substitution sites or, into the remaining (non-conserved) sites.

[0071] The mutations can be made using methods known in the art such as oligonucleotide-mediated (site-directed) mutagenesis, alanine scanning, and PCR mutagenesis. Site-directed mutagenesis (see, e.g., Carter, 1986, Biochem J. 237:1-7; and Zoller et al., 1982, Nucl. Acids Res. 10:6487-500), cassette mutagenesis (see, e.g., Wells et al., 1985, Gene 34:315-23), or other known techniques can be performed on the cloned DNA to produce the variant DNA.

[0072] Nucleic Acid Molecules Encoding the Fusion Protein of the Present Disclosure and the Expression Systems Producing the Fusion Protein of the Present Disclosure

[0073] The present disclosure also provides a nucleic acid molecule expressing the fusion protein as described herein.

[0074] In some embodiments of the disclosure, the nucleic acid molecule has the nucleotide sequence selected from the group consisting of SEQ ID NOs: 1, 3, 5, 7, 9, 11, 13, 15, 17, 19, 21, 23, 25, 27, 29, 31, 33, 35, 37, 39, 41, 43, 45, 47, 49, 51, 53, 55, 57, 59, 61, 63, 65, 67, 69, 71, 73, 75, 77, 79, 81, 83, 85, 87, 89, 91, 93, 95, 97, 99, 101, 103, 105, 107, 109, 111, 113, 115, 117, 119, 121, 123, 125, 127, 129, 131, 133, 135, 137, 139, 141, 143, 145, 147, 149, 151, 153, 155, 157, 159, 161, 163, 165, 167, 169, 171, 173, 175, 177, 179, 181, 183, 185, 187, 189, 191, 193, 195, 197, 199, 201, and 203, or a substantially identical sequence thereof. In some further embodiments, the nucleic acid has the nucleotide sequence selected from the group consisting of SEQ ID NOs: 33, 35, 37, 39, 41, 43, 45, 47, 49, 51, 53, 55, 57, 59, 61, 63, 65, 67, 69, 71, 73, 75, 77, 79, 81, 83, 85, 87, 89, 91, 93, 95, 97, 99, 101, 103, 105, 107, 173, 175, 177, 179, 181, 183, 185, 187, 189, 191, 193, 195, 197, 199, 201, and 203, or a substantial identical sequence thereof.

[0075] The term “substantial identity” or “substantially identical,” when referring to a nucleic acid or a fragment thereof, indicates that, when optimally aligned with appropriate nucleotide insertions or deletions with another nucleic acid (or its complementary strand), there is nucleotide sequence identity in at least 95%, and more preferably at least 96%, 97%, 98% or 99% of the nucleotide bases to the entire sequence of said reference nucleic acid sequence as measured by any well-known algorithm of sequence identity, such as FASTA, BLAST or Gap, as discussed below. A nucleic acid molecule having substantial identity to a reference nucleic acid molecule may, in certain instances, encode a polypeptide having the same or substantially similar amino acid sequence as the polypeptide encoded by the reference nucleic acid molecule.

[0076] The fusion protein can be produced using various expression systems, including prokaryotic and eukaryotic expression systems. Many such systems are widely available from commercial suppliers. In one embodiment, the fusion protein may be expressed using a vector, wherein the polynucleotide encoding said fusion protein is operably linked to a promoter sequence. In one embodiment, the promoter is a constitutive promoter. In another embodiment, the promoter is an inducible promoter.

[0077] In one embodiment, the polynucleotide or vector is contained in a virus. In another embodiment, the virus is selected from the group consisting of a retrovirus, a lentivirus, an adenovirus, and an adeno-associated virus. In one preferred embodiment of the disclosure, the polynucleotide or vector is contained in an adeno-associated virus (AAV) shuttle plasmid.

[0078] Applications of the Fusion Protein of the Present Disclosure

[0079] The present disclosure provides a method for remodeling a glycan of a Fc region of an antibody comprising the following steps: obtaining an antibody that has a heterogeneous glycan in the Fc region of the antibody and contacting the antibody with the fusion protein as described herein.

[0080] In one embodiment of the disclosure, the method comprises:
[0081] providing an antibody having a heterogeneous glycan in the Fc region thereof, a fusion protein of the present disclosure and a target glycan oxazoline, wherein the glycan of the antibody Fc region comprises a N-acetylglucosamine (GlcNAc) residue linking to an Asn residue of Fc region; preferably, the glycan of the antibody Fc region comprises a N-acetylglucosamine (GlcNAc) residue linking to an Asn-297 of Fc region.
[0082] contacting the antibody with the fusion protein and the target glycan oxazoline linking to the antibody Fc region;
[0083] whereby a remodeled glycan of the antibody Fc region can be obtained.

[0084] In one embodiment, the target glycan oxazoline replaces a portion of the glycan of the Fc region for linking to the antibody Fc region. It is believed, though not intended to be restricted by any theoretical that the fusion protein according to the disclosure removes the N-linked GlcNAc in the glycan of the antibody Fc region, and then a glycosylation occurs for adding the target glycan oxazoline to the antibody Fc region. Therefore, a remodeled glycan of the antibody Fc region can be obtained.

[0085] Examples of the remodeled glycan include but are not limited to Sia₂(α2-6)Gal₂GlcNAc₂Man₃GlcNAc₂, Sia₂(α2-6)Gal₂GlcNAc₃Man₃GlcNAc₂, Sia₂(α2-3)Gal₂GlcNAc₂Man₃GlcNAc₂, Sia₂(α2-3)Gal₂GlcNAc₃Man₃GlcNAc₂, Sia₂(α2-3/α2-6)Gal₂GlcNAc₂Man₃GlcNAc₂, Sia₂(α2-6/α2-3)Gal₂GlcNAc₂Man₃GlcNAc₂, Sia₂(α2-3/α2-6)Gal₂GlcNAc₃Man₃GlcNAc₂, Sia₂(α2-6/α2-3)Gal₂GlcNAc₃Man₃GlcNAc₂, Sia(α2-6)Gal₂GlcNAc₂Man₃GlcNAc₂, Sia(α2-3)Gal₂GlcNAc₂Man₃GlcNAc₂, Sia(α2-6)Gal₂GlcNAc₃Man₃GlcNAc₂, Sia(α2-3)Gal₂GlcNAc₃Man₃GlcNAc₂, Sia(α2-6)GalGlcNAc₂Man₃GlcNAc₂, Sia(α2-3)GalGlcNAc₂Man₃GlcNAc₂, Sia(α2-6)GalGlcNAc₃Man₃GlcNAc₂, Sia(α2-3)GalGlcNAc₃Man₃GlcNAc₂, Gal₂GlcNAc₂Man₃GlcNAc₂, GalGlcNAcMan₃GlcNAc₂, Gal₂GlcNAc₃Man₃GlcNAc₂, GalGlcNAc₂Man₃GlcNAc₂, GalGlcNAc₃Man₃GlcNAc₂, GlcNAc₃Man₃GlcNAc₂, GlcNAc₂Man₃GlcNAc₂, GlcNAcMan₃GlcNAc₂, or Man₃GlcNAc₂.

[0086] Preferably, the method further comprises purifying the antibody with Fc region having the remodeled glycan.

[0087] Aspects of the present invention are additionally described by way of the following illustrative non-limiting examples that provide a better understanding of embodiments of the present invention and of its many advantages. The following examples are included to demonstrate preferred embodiments of the invention. It should be appreciated by those of skill in the art that the techniques disclosed in the examples which follow represent techniques used in the present invention to function well in the practice of the invention, and thus can be considered to constitute preferred modes for its practice. However, those of skill in the art should appreciate, in light of the present disclosure that many changes can be made in the specific embodiments which are disclosed and still obtain a like or similar result without departing from the spirit and scope of the invention.

### EXAMPLES

### Fusion Proteins

### Example 1: Production of Fusion Proteins

[0088] Fusion proteins were produced that contain full length or truncated (IgG binding motif only) EndoS or EndoS2 fused to fucosidase BF3242 (Table 1), Alfc (Table 2), BT2970 (Table 3), E00918 (Table 4), and Emfuc3 (Table 5) as shown below in Tables 1 to 5.

TABLE 1
BF3242 Fusion proteins

| Enzyme | Construct | | N.A. SEQ | A.A. SEQ |
|---|---|---|---|---|
| Code | N-terminal | C-terminal | ID NO | ID NO |
| A-C101 | EndoS^{IgG-BD (a)} | BF3242 | 1 | 2 |
| A-C201 | EndoS2^{IgG-BD (a)} | | 3 | 4 |
| D-C101 | EndoS^{WT (b)} | | 5 | 6 |
| D-C201 | EndoS^{D233Q} | | 7 | 8 |
| E-C101 | EndoS2^{WT (b)} | | 9 | 10 |
| E-C201 | EndoS2^{T138E} | | 11 | 12 |
| E-C204 | EndoS2^{T138M} | | 13 | 14 |
| E-C401 | EndoS2^{D184M} | | 15 | 16 |
| A-N101 | BF3242 | EndoS^{IgG-BD (a)} | 17 | 18 |
| A-N201 | | EndoS2^{IgG-BD (a)} | 19 | 20 |
| D-N101 | | EndoS^{WT (b)} | 21 | 22 |
| D-N201 | | EndoS^{D233Q} | 23 | 24 |
| E-N101 | | EndoS2^{WT (b)} | 25 | 26 |
| E-N201 | | EndoS2^{T138E} | 27 | 28 |
| E-N204 | | EndoS2^{T138M} | 29 | 30 |
| E-N401 | | EndoS2^{D184M} | 31 | 32 |

^{(a)} IgG binding domain of endoS or endoS2 only
^{(b)} wild type endoS or endoS2

TABLE 2
Alfc Fusion proteins

| Enzyme | Construct | | N.A. SEQ | A.A. SEQ |
|---|---|---|---|---|
| Code | N-terminal | C-terminal | ID NO | ID NO |
| A-C102 | EndoS^{IgG-BD} | Alfc | 33 | 34 |
| A-C202 | EndoS2^{IgG-BD} | | 35 | 36 |
| B-C101 | EndoS^{WT} | | 37 | 38 |
| B-C201 | EndoS^{D233Q} | | 39 | 40 |
| C-C101 | EndoS2^{WT} | | 41 | 42 |
| C-C201 | EndoS2^{T138E} | | 43 | 44 |
| C-C202 | EndoS2^{T138Q} | | 45 | 46 |
| C-C203 | EndoS2^{T138R} | | 47 | 48 |
| C-C204 | EndoS2^{T138M} | | 49 | 50 |
| C-C205 | EndoS2^{T138L} | | 51 | 52 |
| C-C206 | EndoS2^{T138H} | | 53 | 54 |
| C-C207 | EndoS2^{T138N} | | 55 | 56 |
| C-C208 | EndoS2^{T138K} | | 57 | 58 |
| C-C301 | EndoS2^{D182Q} | | 59 | 60 |
| C-C401 | EndoS2^{D184M} | | 61 | 62 |
| C-C402 | EndoS2^{D184Q} | | 63 | 64 |
| C-C403 | EndoS2^{D184T} | | 65 | 66 |
| C-C404 | EndoS2^{D184L} | | 67 | 68 |
| C-C405 | EndoS2^{D184F} | | 69 | 70 |
| C-C406 | EndoS2^{D184S} | | 71 | 72 |
| C-C407 | EndoS2^{D184V} | | 73 | 74 |
| C-C408 | EndoS2^{D184K} | | 75 | 76 |
| C-C409 | EndoS2^{D184W} | | 77 | 78 |
| C-C410 | EndoS2^{D184M}_L2^{(a)} | | 79 | 80 |
| C-C411 | EndoS2^{D184M}_L4^{(b)} | | 81 | 82 |
| C-C501 | EndoS2^{E186A} | | 83 | 84 |
| C-C601 | EndoS2^{D226Q} | | 85 | 86 |
| C-C701 | EndoS2^{T227Q} | | 87 | 88 |
| A-N102 | Alfc | EndoS^{IgG-BD} | 89 | 90 |
| A-N202 | | EndoS2^{IgG-BD} | 91 | 92 |
| B-N101 | | EndoS^{WT} | 93 | 94 |
| B-N201 | | EndoS^{D233Q} | 95 | 96 |
| C-N101 | | EndoS2^{WT} | 97 | 98 |
| C-N401 | | EndoS2^{D184M} | 99 | 100 |
| C-N402 | | EndoS2^{D184Q} | 101 | 102 |
| C-N403 | | EndoS2^{D184T} | 103 | 104 |
| C-N404 | | EndoS2^{D184L} | 105 | 106 |
| C-N405 | | EndoS2^{D184F} | 107 | 108 |

^{(a)}L2 stands for [GGGGS]₂ (linkage of fusion protein)
^{(b)}L4 stands for [GGGGS]₄ (linkage of fusion protein)

TABLE 3
BT2970 Fusion proteins

| Enzyme | Construct | | N.A. SEQ | A.A. SEQ |
|---|---|---|---|---|
| Code | N-terminal | C-terminal | ID NO | ID NO |
| A-C103 | EndoS^{IgG-BD} | BT2970 | 109 | 110 |
| A-C203 | EndoS2^{IgG-BD} | | 111 | 112 |
| F-C101 | EndoS^{WT} | | 113 | 114 |
| F-C201 | EndoS^{D233Q} | | 115 | 116 |
| G-C101 | EndoS2^{WT} | | 117 | 118 |
| G-C201 | EndoS2^{T138E} | | 119 | 120 |
| G-C204 | EndoS2^{T138M} | | 121 | 122 |
| G-C401 | EndoS2^{D184M} | | 123 | 124 |
| A-N103 | BT2970 | EndoS^{IgG-BD} | 125 | 126 |
| A-N203 | | EndoS2^{IgG-BD} | 127 | 128 |
| F-N101 | | EndoS^{WT} | 129 | 130 |
| F-N201 | | EndoS^{D233Q} | 131 | 132 |
| G-N101 | | EndoS2^{WT} | 133 | 134 |
| G-N201 | | EndoS2^{T138E} | 135 | 136 |
| G-N204 | | EndoS2^{T138M} | 137 | 138 |
| G-N401 | | EndoS2^{D184M} | 139 | 140 |

TABLE 4
EO0918 Fusion proteins

| Enzyme | Construction | | N.A. SEQ | A.A. SEQ |
|---|---|---|---|---|
| Code | N-terminal | C-terminal | ID NO | ID NO |
| A-C104 | EndoS^{IgG-BD} | EO0918 | 141 | 142 |
| A-C204 | EndoS2^{IgG-BD} | | 143 | 144 |
| H-C101 | EndoS^{WT} | | 145 | 146 |
| H-C201 | EndoS^{D233Q} | | 147 | 148 |
| I-C101 | EndoS2^{WT} | | 149 | 150 |
| I-C201 | EndoS2^{T138E} | | 151 | 152 |
| I-C204 | EndoS2^{T138M} | | 153 | 154 |
| I-C401 | EndoS2^{D184M} | | 155 | 156 |
| A-N104 | EO0918 | EndoS^{IgG-BD} | 157 | 158 |
| A-N204 | | EndoS2^{IgG-BD} | 159 | 160 |
| H-N101 | | EndoS^{WT} | 161 | 162 |
| H-N201 | | EndoS^{D233Q} | 163 | 164 |
| I-N101 | | EndoS2^{WT} | 165 | 166 |
| I-N201 | | EndoS2^{T138E} | 167 | 168 |
| I-N204 | | EndoS2^{T138M} | 169 | 170 |
| I-N401 | | EndoS2^{D184M} | 171 | 172 |

TABLE 5
Emfuc3 Fusion proteins

| Enzyme | Construction | | N.A. SEQ | A.A. SEQ |
|---|---|---|---|---|
| Code | N-terminal | C-terminal | ID NO | ID NO |
| A-C105 | EndoS^{IgG-BD} | Emfuc3 | 173 | 174 |
| A-C205 | EndoS2^{IgG-BD} | | 175 | 176 |
| J-C101 | EndoS^{WT} | | 177 | 178 |
| J-C201 | EndoS^{D233Q} | | 179 | 180 |
| K-C101 | EndoS2^{WT} | | 181 | 182 |
| K-C201 | EndoS2^{T138E} | | 183 | 184 |
| K-C204 | EndoS2^{T138M} | | 185 | 186 |
| K-C401 | EndoS2^{D184M} | | 187 | 188 |
| A-N105 | Emfuc3 | EndoS^{IgG-BD} | 189 | 190 |
| A-N205 | | EndoS2^{IgG-BD} | 191 | 192 |
| J-N101 | | EndoS^{WT} | 193 | 194 |
| J-N201 | | EndoS^{D233Q} | 195 | 196 |
| K-N101 | | EndoS2^{WT} | 197 | 198 |
| K-N201 | | EndoS2^{T138E} | 199 | 200 |
| K-N204 | | EndoS2^{T138M} | 201 | 202 |
| K-N401 | | EndoS2^{D184M} | 203 | 204 |

### Remodeling a Glycan of an Antibody Fc Region

### Example 2: Fucosidase Activity Assay

[0089] A test antibody, i.e., trastuzumab (TRZ), was treated with endoS2 in Tris-HCl (pH 7.0) at 37° C. for 1 hour. The treated antibody was purified by adsorbing onto a protein A affinity chromatography resin (MabSelect™), washing with Tris-HCl (pH 7.4), and eluting with citric acid buffer (pH 3.0). Most of the residual glycan in the Fc region of the resulting antibody is N-acetylglucosamine-fucose (GlcNAc-Fuc). The purified antibody was treated with fusion proteins or native fucosidases in Tris-HCl buffer (pH 7.0) at 37° C. for 16 h, followed by heating at 55° C. for 20 min to inactivate enzymatic activities. The reaction mixtures were filtered through a 0.22 μm membrane and the treated antibodies were purified by affinity chromatography.

[0090] The levels of residual fucose were determined by analysis of intact protein mass. The ratio of TRZ-N/N (TRZ which contains two GlcNAc in the Fc region), TRZ-N/NF (TRZ which contains one GlcNAc and one GlcNAc-Fuc in the Fc region), and TRZ-NF/NF (TRZ which contains two GlcNAc-Fuc in the Fc region) was identified by the intensities of each mass peak. The results are shown below in Table 6 and in FIG. 1.

TABLE 6
Percentage of fucose removed from test antibody TRZ

| Enzyme | | | Analyses of Fucose by Intact Mass Intensity | | | | |
|---|---|---|---|---|---|---|---|
| Enzyme | Construction | | N/N | N/NF | NF/NF | Fucose | De-fucose Percentage |
| Code | N-terminal | C-terminal | (%) | (%) | (%) | Level (%) | by Enzyme (%) |
| None | No enzyme | | 7.16 | 15.29 | 77.55 | 85.2 | 0 |
| BF3242 | BF3242 | | 12.34 | 35.99 | 51.67 | 69.67 | 18.22 |
| E-C401 | EndoS2^{D184M} | BF3242 | 10.78 | 32.5 | 56.72 | 72.97 | 14.35 |
| E-N401 | BF3242 | EndoS2^{D184M} | 8.72 | 24.29 | 66.99 | 79.14 | 7.11 |
| A-N201 | BF3242 | EndoS2^{IgG-BD} | 18.23 | 41.14 | 40.63 | 61.2 | 28.17 |
| Alfc | Alfc | | 13.76 | 37.38 | 48.86 | 67.55 | 20.72 |
| C-C401 | EndoS2^{D184M} | Alfc | 80.96 | 14.85 | 4.18 | 11.61 | 86.37 |
| C-C402 | EndoS2^{D184Q} | Alfc | 75.29 | 19.56 | 5.15 | 14.93 | 82.48 |
| C-C403 | EndoS2^{D184T} | Alfc | 79.97 | 16.03 | 4 | 12.02 | 85.89 |
| C-C404 | EndoS2^{D184L} | Alfc | 80.23 | 15.55 | 4.22 | 12 | 85.92 |
| C-C405 | EndoS2^{D184F} | Alfc | 75.37 | 19.32 | 5.32 | 14.98 | 82.42 |
| C-N401 | Alfc | EndoS2^{D184M} | 26.75 | 44.59 | 28.66 | 50.96 | 40.19 |
| C-N402 | Alfc | EndoS2^{D184Q} | 29.94 | 45.13 | 24.93 | 47.5 | 44.25 |
| C-N403 | Alfc | EndoS2^{D184T} | 32.9 | 45.14 | 21.36 | 44.53 | 47.73 |
| C-N404 | Alfc | EndoS2^{D184L} | 25.85 | 46.22 | 27.93 | 51.04 | 40.09 |
| C-N405 | Alfc | EndoS2^{D184F} | 26.67 | 44.25 | 29.08 | 51.21 | 39.89 |

[0091] The results showed that fucosidase activity of Bacteroides fragilis fucosidase BF3242 was not improved by fusing it to an S. pyogenes endoS2 D184M mutant. Compare BF3242 (18.22% fucose removed) to E-C401 (14.35%) and E-N401 (7.11%).

[0092] Surprisingly, the fucosidase activity of Alfc was significantly increased by fusing this enzyme to either the N-terminus or the C-terminus of a D184 mutant endoS2 enzyme. For example, Alfc removed 20.72% of fucose from the test antibody, while Alfc fused to the N-terminus of the EndoS2 D184M mutant removed 40.19% of fucose. Compare Alfc with C-N401. More unexpectedly, Alfc fused to the C-terminus of EndoS2 D184M (C-C401) removed as much as 86.37% of fucose from the test antibody. Notably, all of the tested Alfc fusions at the C-terminus of EndoS2 D184 mutants, i.e., D184M, D184Q, D184T, D184L, and D184F, showed an unexpectedly high fucosidase activity, as compared to fusion of Alfc at the EndoS2 mutant N-terminus.

### Example 3: Fucosidase Activity of Additional Alfc Fusion Proteins

[0093] Additional fusion proteins having Alfc fused to the C-terminus of native or site-specific mutant EndoS2 enzymes were tested for their fucosidase activity on TRZ as described above in Example 2. The results are shown below in Table 7 and in FIG. 2.

TABLE 7
Percentage of fucose removed from test antibody TRZ

| Enzyme | | | Analyses of Fucose by Intact Mass Intensity | | | | |
|---|---|---|---|---|---|---|---|
| Enzyme | Construction | | | | | Fucose | De-fucose percentage |
| Code | N-terminal | C-terminal | N/N | N/NF | NF/NF | Level | by enzyme |
| None | No enzyme | | 7.26 | 15.29 | 77.55 | 85.20 | 0 |
| L23C | Alfc only | | 20.40 | 43.67 | 35.92 | 57.76 | 32.21 |
| C-C101 | EndoS2^{WT} | Alfc | 84.65 | 12.76 | 2.60 | 8.98 | 89.46 |
| C-C201 | EndoS2 [symbol] | Alfc | 84.78 | 12.67 | 2.55 | 8.89 | 89.57 |
| C-C206 | EndoS2 [symbol] | Alfc | 83.56 | 13.48 | 2.96 | 9.7 | 88.62 |
| C-C208 | EndoS2 [symbol] | Alfc | 84.76 | 12.46 | 2.77 | 9 | 89.44 |
| C-C205 | EndoS2 [symbol] | Alfc | 85.68 | 11.62 | 2.70 | 8.51 | 90.01 |
| C-C204 | EndoS2 [symbol] | Alfc | 86.63 | 11.08 | 2.29 | 7.83 | 90.81 |
| C-C207 | EndoS2 [symbol] | Alfc | 79.54 | 17.38 | 3.08 | 11.77 | 86.16 |
| C-C202 | EndoS2 [symbol] | Alfc | 85.30 | 12.11 | 2.59 | 8.65 | 89.85 |
| C-C203 | EndoS2 [symbol] | Alfc | 85.75 | 11.71 | 2.55 | 8.41 | 90.13 |
| C-C301 | EndoS2 [symbol] | Alfc | 81.09 | 15.41 | 3.49 | 11.20 | 86.85 |
| C-C408 | EndoS2 [symbol] | Alfc | 85.30 | 11.86 | 2.84 | 8.77 | 89.71 |
| C-C409 | EndoS2 [symbol] | Alfc | 81.55 | 14.38 | 4.05 | 11.26 | 86.78 |
| C-C501 | EndoS2 [symbol] | Alfc | 84.67 | 12.74 | 2.59 | 8.96 | 89.48 |
| C-C601 | EndoS2 [symbol] | Alfc | 85.49 | 11.65 | 2.87 | 8.70 | 89.79 |
| C-C701 | EndoS2 [symbol] | Alfc | 76.58 | 19.91 | 3.51 | 13.47 | 84.19 |

[symbol]

indicates data missing or illegible when filed

[0094] The results showed that all of the Alfc/EndoS2 fusion proteins tested removed significantly more fucose from TRZ, as compared to Alfc alone.

[0095] Additional fusion proteins of five fucosidases with truncated EndoS2 were tested for their fucosidase activity on TRZ as described above in Example 2. The results are shown below in Table 8 and in FIG. 3.

TABLE 8
Percentage of fucose removed from test antibody TRZ

| Enzyme | | | Analyses of Fucose by Heavy Chain Mass Intensity | | |
|---|---|---|---|---|---|
| Enzyme | Construction | | N | NF | De-fucose Percentage |
| Code | N-terminal | C-terminal | (%) | (%) | by Enzyme (%) |
| None | No enzyme | | 11.78 | 88.22 | 0 |
| Alfc | Alfc | | 40.45 | 59.55 | 32.5 |
| A-C201 | EndoS2^{IgG-BD} | BF3242 | 23.29 | 76.71 | 13.05 |
| A-C202 | EndoS2^{IgG-BD} | Alfc | 70.52 | 29.48 | 66.58 |
| A-C203 | EndoS2^{IgG-BD} | BT2970 | 11.99 | 88.01 | 0.24 |
| A-C204 | EndoS2^{IgG-BD} | EO0918 | 11.6 | 88.4 | −0.2 |
| A-C205 | EndoS2^{IgG-BD} | Emfuc3 | 33.79 | 66.21 | 24.95 |
| A-N202 | Alfc | EndoS2^{IgG-BD} | 60.24 | 39.76 | 54.93 |
| A-N203 | BT2970 | EndoS2^{IgG-BD} | 11 | 89 | −0.88 |
| A-N204 | EO0918 | EndoS2^{IgG-BD} | 12.8 | 87.2 | 1.16 |
| A-N205 | Emfuc3 | EndoS2^{IgG-BD} | 39.91 | 60.09 | 31.89 |

[0096] The de-fucose capability of Alfc was improved obviously. The fusion proteins of BT2970 & E00918 could not remove the core-fucose of antibody.

### Example 4 Additional Fusion Proteins Having Alfc or Emfuc3 Fused to the Truncated EndoS2 or Site-Specific Mutant EndoS2 Enzymes

[0097] Additional fusion proteins having Alfc or Emfuc3 fused to the truncated EndoS2 or site-specific mutant EndoS2 enzymes were tested for their fucosidase activity on TRZ as described above in Example 2. The results are shown below in Table 9 and in FIG. 4.

TABLE 9
Percentage of fucose removed from test antibody TRZ

| Enzyme | | | Analyses of Fucose by Heavy Chain Mass Intensity | | |
|---|---|---|---|---|---|
| Enzyme | Construction | | N | NF | De-fucose Percentage |
| Code | N-terminal | C-terminal | (%) | (%) | by Enzyme (%) |
| None | No enzyme | | 12.19 | 87.81 | 0 |
| Alfc | Alfc | | 39.47 | 60.53 | 31.07 |
| A-C202 | EndoS2^{IgG-BD} | Alfc | 69.02 | 30.98 | 64.72 |
| A-N202 | Alfc | EndoS2^{IgG-BD} | 59.46 | 40.54 | 53.83 |
| C-C204 | EndoS2^{T138M} | Alfc | 93.03 | 6.97 | 92.06 |
| Emfuc3 | Emfuc3 | | 32.52 | 67.48 | 23.15 |
| A-C205 | EndoS2^{IgG-BD} | Emfuc3 | 35.52 | 64.48 | 26.57 |
| A-N205 | Emfuc3 | EndoS2^{IgG-BD} | 47.38 | 52.62 | 40.08 |

[0098] The de-fucose capability of Alfc could be more increased when fused to C-terminal of intact EndoS2 mutations (C-C204), than truncated EndoS2 (IgG binding domain), A-C202 & A-N202. The de-fucose capability of Emfuc3 could be improved when fused to N-terminal of truncated EndoS2 (IgG binding domain), A-N205, but not when fused to C-terminal of truncated EndoS2 (IgG binding domain), A-C205.

### Example 5

[0099] Additional fusion proteins having Alfc or Emfuc3 fused to the N-terminus of truncated or site-specific mutant EndoS or EndoS enzymes were tested for their fucosidase activity on TRZ as described above in Example 2. The results are shown below in Table 10 and in FIG. 5.

TABLE 10
Percentage of fucose removed from test antibody TRZ

| Enzyme | | | Analyses of Fucose by Heavy Chain Mass intensity | | |
|---|---|---|---|---|---|
| Enzyme | Construction | | N | NF | De-fucose Percentage |
| Code | N-terminal | C-terminal | (%) | (%) | by Enzyme (%) |
| None | No enzyme | | 10.4 | 89.6 | 0 |
| Alfc | Alfc | | 30.04 | 66.96 | 25.27 |
| B-N201 | Alfc | EndoS^{D233Q} | 36.09 | 63.91 | 28.67 |
| Emfuc3 | Emfuc3 | | 21.6 | 78.4 | 12.5 |
| J-N201 | Emfuc3 | EndoS^{D233Q} | 59.37 | 40.63 | 54.65 |
| K-N204 | Emfuc3 | EndoS2^{T138M} | 46.17 | 53.83 | 39.92 |
| K-N401 | Emfuc3 | EndoS2^{D184M} | 43.85 | 56.15 | 37.33 |
| A-N105 | Emfuc3 | EndoS^{IgG-BD} | 46.17 | 53.83 | 39.92 |

[0100] The activity of Alfc was dramatic improved after fusing with EndoS2, but not improved after fusing with EndoS. In contrast, the activity of Emfuc3 was improved more obviously after fusing with EndoS rather than EndoS2.

### Example 6 Additional Fusion Proteins Having EndoS or EndoS2/Emfuc3, EndoS/BF3242, Alfc, Emfuc3 or BF3242 Fucosidase

[0101] Additional fusion proteins having EndoS or EndoS2/Emfuc3, EndoS/BF3242, Alfc, Emfuc3 or BF3242 fucosidase, enzymes were tested for their fucosidase activity on TRZ as described above in Example 2. The results are shown below in Table 11 and in FIG. 6.

TABLE 11
Percentage of fucose removed from test antibody TRZ

| Enzyme | | | Analyses of Fucose by Heavy Chain Mass intensity | | |
|---|---|---|---|---|---|
| Enzyme | Construction | | N | NF | De-fucose Percentage |
| Code | N-terminal | C-terminal | (%) | (%) | by Enzyme (%) |
| None | No enzyme | | 10.12 | 89.88 | 0 |
| Alfc | Alfc | | 33.81 | 66.19 | 26.36 |
| Emfuc3 | Emfuc3 | | 22.48 | 77.52 | 13.75 |
| K-C204 | EndoS2^{T138M} | Emfuc3 | 37.19 | 62.81 | 30.12 |
| K-C401 | EndoS2^{D184M} | Emfuc3 | 38.13 | 61.87 | 31.16 |
| J-C201 | EndoS^{D233Q} | Emfuc3 | 25.32 | 74.68 | 16.91 |
| BF3242 | BF3242 | | 19.72 | 80.28 | 10.68 |
| D-C201 | EndoS^{D233Q} | BF3242 | 21.83 | 78.17 | 13.03 |

[0102] Comparing with Example 5, more significant improvement was observed when fusing Emfuc3 with N-terminal of EndoS-mutation and EndoS2-mutation than fusing to C-terminal of endoglycosidase.

### Example 7 Additional Fusion Proteins Having BF3242 Fused to the Truncated or Site-Specific Mutant EndoS2 or EndoS Enzymes

[0103] Additional fusion proteins having BF3242 fused to the truncated or site-specific mutant EndoS2 or EndoS enzymes were tested for their fucosidase activity on TRZ as described above in Example 2. The results are shown below in Table 12 and in FIG. 7.

TABLE 12
Percentage of fucose removed from test antibody TRZ

| Enzyme | | | Analyses of Fucose by Heavy Chain Mass intensity | | |
|---|---|---|---|---|---|
| Enzyme | Construction | | N | NF | De-fucose Percentage |
| Code | N-terminal | C-terminal | (%) | (%) | by Enzyme (%) |
| None | No enzyme | | 13.05 | 86.95 | 0 |
| BF3242 | BF3242 | | 33.67 | 66.33 | 23.71 |
| A-C201 | EndoS2^{IgG-BD} | BF3242 | 23.15 | 76.85 | 11.62 |
| D-C201 | EndoS^{D233Q} | BF3242 | 23.9 | 76.1 | 12.48 |
| E-C401 | EndoS2^{D184M} | BF3242 | 30.27 | 69.73 | 19.8 |
| A-N201 | BF3242 | EndoS2^{IgG-BD} | 30.43 | 69.57 | 20 |
| D-N201 | BF3242 | EndoS^{D233Q} | 32.95 | 67.05 | 22.89 |
| E-N401 | BF3242 | EndoS2^{D184M} | 27.99 | 72.01 | 17.18 |

[0104] The de-core-fucose capability of BF3242 could not be improved by fusing with endoglycosidase.

### Example 8 Glyco-Engineering of TRZ by Fusion Protein, C-C401

[0105] Test antibody TRZ was treated with fusion protein C-C401, i.e., Alfc fused to the C-terminus of endoS2 D184M, in Tris-HCl (pH 7.0) at 37° C. for 16 h to 20 h. After adjusting the reaction to 30° C., a sialylated complex type glycan-oxazoline, i.e., Sia₂(α2-6)Gal₂GlcNAc₂Man₃GlcNAc-oxazoline or the non-sialylated version (Gal₂GlcNAc₂Man₃GlcNAc-oxazoline) was added and the reaction incubated for 30 min to 1 h. The glyco-engineered TRZ was purified as described above in Example 2. The resulting glyco-engineered TRZ contained two Sia₂(α2-6)Gal₂GlcNAc₂Man₃GlcNAc₂ (G2S2) or two Gal₂GlcNAc₂Man₃GlcNAc₂ (G2) in the Fc region. Samples of the reactions were removed at different time intervals and analyzed by SDS-PAGE. The results are presented in FIGS. 8A and 8B.

[0106] As shown in FIG. 8A, treatment of TRZ (lane 1) for 20 h with C-C401 removed all but the N-linked GlcNAc (lane 4) to yield TRZ-N/N (GlcNAc/GlcNac; lane 3). The amount of TRZ-N/N glycosylated after adjusting the temperature and adding Sia₂(α2-6)Gal₂GlcNAc₂Man₃GlcNAc-oxazoline was 95%, 98%, and 98% after 10 min., 20 min., and 30 min., respectively. See lanes 5, 6, and 7. Purified glyco-engineered TRZ-G2S2/G2S2 is shown in lane 8.

[0107] Turning to FIG. 8B, it shows that, after deglycosylation of TRZ for 16 h (lane 3), the amount of TRZ-N/N glycosylated after adjusting the temperature and adding Gal₂GlcNAc₂Man₃GlcNAc-oxazoline was 98% at all time points. See lanes 4-7. Purified glyco-engineered TRZ-G2/G2 is shown in lane 8.

### Example 9 Glyco-Engineering of Rituximab (RTX) by Fusion Protein, C-C401

[0108] Test antibody RTX was treated with fusion protein C-C401 in Tris-HCl. After adjusting the temperature to 30° C., Sia₂(α2-6)Gal₂GlcNAc₂Man₃GlcNAc-oxazoline was added and the reaction incubated for 1 h. The glycan remodeled RTX was purified as described above in Example 2. The resulting RTX contained two G2S2 in the Fc region. Samples of the reactions were removed at different time intervals and analyzed by SDS-PAGE. The results are shown in FIG. 9.

[0109] Treatment of RTX (lane 4) for 20 h with C-C401 removed all but the N-linked GlcNAc to yield RTX-N/N (GlcNAc/GlcNac; lane 5). The amount of RTX-N/N glycosylated after adjusting the temperature and adding Sia₂(α2-6)Gal₂GlcNAc₂ Man₃GlcNAc-oxazoline was 95%, 98%, and 98% after 10 min., 20 min., and 30 min., respectively. See lanes 6, 7, and 8. Purified glyco-engineered RTX-G2S2/G2S2 is shown in lane 9.

### Example 10 Glyco-Engineering of TRZ by Fusion Protein, C-C406

[0110] Test antibody TRZ, was treated with fusion protein C-C406, i.e., Alfc fused to the C-terminus of endoS2 D184S, in Tris-HCl (pH 7.0) at 37° C. for 16 h. After adjusting the temperature to 30° C., Sia₂(α2-6)Gal₂GlcNAc₂Man₃GlcNAc-oxazoline was added and the reaction incubated for 1 h. The glycan remodeled TRZ was purified as set forth in Example 2, supra. The resulting TRZ contained two G2S2 in the Fc region. Samples of the reactions were removed at different time intervals and analyzed by SDS-PAGE. The results are shown in FIG. 10.

[0111] Treatment of TRZ (lane 1) for 16 h with C-C406 removed all but the N-linked GlcNAc to form TRZ-NN (GlcNAc/GlcNac; lane 4). The amount of TRZ-N/N glycosylated after adjusting the temperature and adding Sia₂(α2-6)Gal₂GlcNAc₂Man₃GlcNAc-oxazoline was 90%, 95%, 98%, and 98% after 30 min., 60 min., 90 min., and 120 min., respectively. See lanes 5, 6, 7, and 8. Purified glyco-engineered TRZ-G2S2/G2S2 is shown in lane 9.

### Example 11 Glyco-Engineering of TRZ by Fusion Protein, C-C407

[0112] Test antibody TRZ was treated with fusion protein C-C407, i.e., Alfc fused to the C-terminus of endoS2 D184V in Tris-HCl (pH 7.0) at 37° C. for 12 h. Sia₂(α2-6)Gal₂GlcNAc₂Man₃GlcNAc-oxazoline was added and the reaction incubated for 1 h. The glycan remodeled TRZ was purified as described above. The resulting TRZ contained two G2S2 in the Fc region. Samples of the reactions were removed at different time intervals and analyzed by SDS-PAGE. The results are shown in FIG. 11.

[0113] Treatment of TRZ (lane 1) for 12 h with C-C407 removed all but the N-linked GlcNAc to yield TRZ-N/N (GlcNAc/GlcNac; lane 8). The amount of TRZ-N/N glycosylated after adjusting the temperature and adding Sia₂(α2-6)Gal₂GlcNAc₂Man₃GlcNAc-oxazoline was 80%, 95%, 98%, and 98% after 30 min., 60 min., 90 min., and 120 min., respectively. See lanes 4, 5, 6, and 7. Purified glyco-engineered TRZ-G2S2/G2S2 is shown in lane 9.

### Example 12 Glyco-Engineering of TRZ by Fusion Protein, C-C204

[0114] Test antibody TRZ was treated with fusion protein C-C204, i.e., Alfc fused to the C-terminus of endoS2 T138M in Tris-HCl (pH 7.0) at 37° C. for 16 h. Sia₂(α2-6)Gal₂GlcNAc₂Man₃GlcNAc-oxazoline was added and the reaction incubated for 4 h. The glycan remodeled TRZ (50 min) was purified as described above. The resulting TRZ contained two G2S2 in the Fc region. Samples of the reactions were removed at different time intervals and analyzed by SDS-PAGE. The results are shown in FIG. 12.

[0115] Treatment of TRZ (lane 1) for 16 h with C-C204 removed all but the N-linked GlcNAc to yield TRZ-NN (GlcNAc/GlcNac; lane 3). The amount of TRZ-N/N glycosylated after adjusting the temperature and adding Sia₂(α2-6)Gal₂GlcNAc₂Man₃GlcNAc-oxazoline was 80%, 95%, 98%, 98%, 95% and 90% after 15 min, 30 min, 45 min, 50 min, 120 min, and 240 min, respectively. See lanes 4, 5, 6, 7, 8, and 9. Purified glyco-engineered TRZ-G2S2/G2S2 (50 min) is shown in lane 10.

[0116] While the present disclosure has been described in conjunction with the specific embodiments set forth above, many alternatives thereto and modifications and variations thereof will be apparent to those of ordinary skill in the art. All such alternatives, modifications and variations are regarded as falling within the scope of the present disclosure.

The application's sequence listing, which the Patent Office published only in electronic form, follows.

SEQUENCE LISTING (204 sequences)

SEQ ID NO: 1 - DNA, 2985 bp, Artificial Sequence
  SYNTHETIC FUSION PROTEN
atgggcagcagccatcatcatcatcatcacagcagcggcctggtgccgcgcggcagccatatgggtaccctgcagggatccaaagataagtcgtatgatctgattgatgagaaagatttcccagataaggctttgcgagaagctgtgatggcgcaggttggaaccagaaaaggtgatttggaacgtttcaatggcacattacgattggataatccagcgattcaaagtttagaaggtctaaataaatttaaaaaattagctcaattagacttgattggcttatctcgcattacaaagctcgaccgttctgttttacccgctaatatgaagccaggcaaagataccttggaaacagttcttgaaacctataaaaaggataacaaagaagaacctgctactatcccaccagtatctttgaaggtttctggtttaactggtctgaaagaattagatttgtcaggttttgaccgtgaaaccttggctggtcttgatgccgctactctaacgtctttagaaaaagttgatatttctggcaacaaacttgatttggctccaggaacagaaaatcgacaaatttttgatactatgctatcaactatcagcaatcatgttggaagcaatgaacaaacagtgaaatttgacaagcaaaaaccaactgggcattacccagatacctatgggaaaactagtctgcgcttaccagtggcaaatgaaaaagttgatttgcaaagccagcttttgtttgggactgtgacaaatcaaggaaccctaatcaatagcgaagcagactataaggcttaccaaaatcataaaattgctggacgtagctttgttgattcaaactatcattacaataactttaaagtttcttatgagaactataccgttaaagtaactgattccacattgggaaccactactgacaaaacgctagcaactgataaagaagagacctataaggttgacttctttagcccagcagataagacaaaagctgttcatactgctaaagtgattgttggtgacgaaaaaaccatgatggttaatttggcagaaggcgcaacagttattggaggaagtgctgatcctgtaaatgcaagaaaggtatttgatgggcaactgggcagtgagactgataatatctctttaggatgggattctaagcaaagtattatatttaaattgaaagaagatggattaataaagcattggcgtttcttcaatgattcagcccgaaatcctgagacaaccaataaacctattcaggaagcaagtctacaaatttttaatatcaaagattataatctagataatttgttggaaaatcccaataaatttgatgatgaaaaatattggattactgtagatacttacagtgcacaaggagagagagctactgcattcagtaatacattaaataatattactagtaaatattggcgagttgtctttgatactaaaggagatagatatagttcgccagtagtccctgaactccaaattttaggttatccgttacctaacgccgacactatcatgaaaacagtaactactgctaaagagttatctcaacaaaaagataagttttctcaaaagatgcttgatgagttaaaaataaaagagatggctttagaaacttctttgaacagtaagatttttgatgtaactgctattaatgctaatgctggagttttgaaagattgtattgagaaaaggcagctgctaaaaaaaggcggtgcacagcaaaagtatcaaccgacagaggctaacctgaaagcccggagtgaatttcaggacaataagtttggaatcttccttcattggggactctatgccatgctcgctaccggagagtggacgatgacaaacaataacctgaattataaagagtatgccaaactggccgggggattctatccttcgaagtttgatgcagacaaatgggtagcagccatcaaggcttccggagctaaatatatttgcttcactactcgtcatcacgagggattctcgatgttcgataccaagtactctgattataacattgtaaaagcgactcctttcaaacgtgatgtggtgaaggagctggccgatgcatgtgccaaacatggcatcaaacttcacttctattattcacatatagactggtatcgtgaagatgctcctcagggaagaaccggacgtagaaccggacgtcccaatccgaaaggagattggaagagctattatcagtttatgaataatcagttgacagagctgctgactaattatggtccgatcggcgctatctggtttgacggttggtgggatcaggacatcaatcccgatttcgattgggaacttcccgagcaatatgcacttattcatcgtttgcagccggcttgcctggtaggtaacaaccaccatcagacaccttttgccggagaagatattcaaatcttcgagcgtgatttgccgggagagaatactgcaggactttcgggacaaagcgtcagccatctgcctcttgaaacatgtgagacgatgaatggtatgtggggatacaagattacagatcagaattataaatcgactaaaactttgattcactatctggtgaaagctgccggtaaagatgcaaatctgttgatgaacatcggtccgcaacctgatggtgaacttccggaagtggccgttcagcgcttgaaggaagtgggagagtggatgtcgaaatatggtgaaactatttatggaaccagaggcggtctggttgctccgcatgattggggagtaacgactcaaaaaggcaataaactttatgtacacattcttaatttacaggataaggcactcttcttgcctattgtcgataagaaagtgaaaaaggcggtggtctttgctgacaaaacaccggtacgtttcacaaagaataaggaaggaattgtactggaacttgctaaagttccaacggatgtagactacgtggtagaacttacaattgactaa

SEQ ID NO: 2 - protein, 994 aa, Artificial Sequence
  SYNTHETIC FUSION PROTEN
MGSSHHHHHHSSGLVPRGSHMGTLQGSKDKSYDLIDEKDFPDKALREAVMAQVGTRKGDLERFNGTLRLDNPAIQSLEGLNKFKKLAQLDLIGLSRITKLDRSVLPANMKPGKDTLETVLETYKKDNKEEPATIPPVSLKVSGLTGLKELDLSGFDRETLAGLDAATLTSLEKVDISGNKLDLAPGTENRQIFDTMLSTISNHVGSNEQTVKFDKQKPTGHYPDTYGKTSLRLPVANEKVDLQSQLLFGTVTNQGTLINSEADYKAYQNHKIAGRSFVDSNYHYNNFKVSYENYTVKVTDSTLGTTTDKTLATDKEETYKVDFFSPADKTKAVHTAKVIVGDEKTMMVNLAEGATVIGGSADPVNARKVFDGQLGSETDNISLGWDSKQSIIFKLKEDGLIKHWRFFNDSARNPETTNKPIQEASLQIFNIKDYNLDNLLENPNKFDDEKYWITVDTYSAQGERATAFSNTLNNITSKYWRVVFDTKGDRYSSPVVPELQILGYPLPNADTIMKTVTTAKELSQQKDKFSQKMLDELKIKEMALETSLNSKIFDVTAINANAGVLKDCIEKRQLLKKGGAQQKYQPTEANLKARSEFQDNKFGIFLHWGLYAMLATGEWTMTNNNLNYKEYAKLAGGFYPSKFDADKWVAAIKASGAKYICFTTRHHEGFSMFDTKYSDYNIVKATPFKRDVVKELADACAKHGIKLHFYYSHIDWYREDAPQGRTGRRTGRPNPKGDWKSYYQFMNNQLTELLTNYGPIGAIWFDGWWDQDINPDFDWELPEQYALIHRLQPACLVGNNHHQTPFAGEDIQIFERDLPGENTAGLSGQSVSHLPLETCETMNGMWGYKITDQNYKSTKTLIHYLVKAAGKDANLLMNIGPQPDGELPEVAVQRLKEVGEWMSKYGETIYGTRGGLVAPHDWGVTTQKGNKLYVHILNLQDKALFLPIVDKKVKKAVVFADKTPVRFTKNKEGIVLELAKVPTDVDYVVELTID

SEQ ID NO: 3 - DNA, 2712 bp, Artificial Sequence
  SYNTHETIC FUSION PROTEN
atgggcagcagccatcatcatcatcatcacagcagcggcctggtgccgcgcggcagccatatgggtaccctgcagggatccaccgaagacaaacgctatgatgtcattgatcaaaaagacattcctgacccagcattaagagaacaaatcattcaacaagttggacagtataaaggcgatttggaacgttataacaagacattggtgcttacaggagataagattcaaaatcttaaaggactagaaaaattaagcaagttacaaaaattagagttgcgccagctatctaacgttaaagaaattactccagaacttttgccggaaagcatgaaaaaagatgctgagcttgttatggtaggcatgactggtttagaaaaactaaaccttagtggtctaaatcgtcaaactttagacggtatagacgtgaatagtattacgcatttgacatcatttgatatttcacataatagtttggacttgtcggaaaagagtgaagaccgtaaactattaatgactttgatggagcaggtttcaaatcatcaaaaaataacggtgaaaaatacggcttttgaaaatcaaaaaccgaaaggttattatcctcagacgtatgataccaaagaaggtcattatgatgttgataatgcagaacatgatattttaactgattttgtttttggaactgttactaaacgtaatacctttattggagacgaagaagcatttgctatctataaagaaggagctgtcgatggtcgacaatatgtgtctaaagactatacttatgaagcttttcgtaaagactataaaggttacaaggttcatttaactgcttctaacctaggagaaacagttacttctaaggtaactgctactactgatgaaacttacttagtagatgtttctgatggggaaaaagttgttcaccacatgaaactcaatataggatctggtgccatcatgatggaaaatctggcaaaaggggctaaagtgattggtacatctggggactttgagcaagcaaagaagattttcgatggtgaaaagtcagatagattcttcacttggggacaaactaactggatagcttttgatctaggagaaattaatcttgcgaaggaatggcgtttatttaatgcagagacaaatactgaaataaagacagatagtagcttaaacgtggctaaaggacgtcttcagattttaaaagatacaactattgatttagaaaaaatggacataaaaaatcgtaaagagtatctgtcgaatgatgaaaattggactgatgttgctcagatggatgatgcaaaagcgatatttaatagtaaattatccaatgttttatctcggtattggcggttttgtgtagatggtggagctagctcttattaccctcaatataccgaacttcaaatcctcggacaacgtttatcaaatgatgtcgctaatacgctgaaggatggcggtgcacagcaaaagtatcaaccgacagaggctaacctgaaagcccggagtgaatttcaggacaataagtttggaatcttccttcattggggactctatgccatgctcgctaccggagagtggacgatgacaaacaataacctgaattataaagagtatgccaaactggccgggggattctatccttcgaagtttgatgcagacaaatgggtagcagccatcaaggcttccggagctaaatatatttgcttcactactcgtcatcacgagggattctcgatgttcgataccaagtactctgattataacattgtaaaagcgactcctttcaaacgtgatgtggtgaaggagctggccgatgcatgtgccaaacatggcatcaaacttcacttctattattcacatatagactggtatcgtgaagatgctcctcagggaagaaccggacgtagaaccggacgtcccaatccgaaaggagattggaagagctattatcagtttatgaataatcagttgacagagctgctgactaattatggtccgatcggcgctatctggtttgacggttggtgggatcaggacatcaatcccgatttcgattgggaacttcccgagcaatatgcacttattcatcgtttgcagccggcttgcctggtaggtaacaaccaccatcagacaccttttgccggagaagatattcaaatcttcgagcgtgatttgccgggagagaatactgcaggactttcgggacaaagcgtcagccatctgcctcttgaaacatgtgagacgatgaatggtatgtggggatacaagattacagatcagaattataaatcgactaaaactttgattcactatctggtgaaagctgccggtaaagatgcaaatctgttgatgaacatcggtccgcaacctgatggtgaacttccggaagtggccgttcagcgcttgaaggaagtgggagagtggatgtcgaaatatggtgaaactatttatggaaccagaggcggtctggttgctccgcatgattggggagtaacgactcaaaaaggcaataaactttatgtacacattcttaatttacaggataaggcactcttcttgcctattgtcgataagaaagtgaaaaaggcggtggtctttgctgacaaaacaccggtacgtttcacaaagaataaggaaggaattgtactggaacttgctaaagttccaacggatgtagactacgtggtagaacttacaattgactaa

SEQ ID NO: 4 - protein, 903 aa, Artificial Sequence
  SYNTHETIC FUSION PROTEN
MGSSHHHHHHSSGLVPRGSHMGTLQGSTEDKRYDVIDQKDIPDPALREQIIQQVGQYKGDLERYNKTLVLTGDKIQNLKGLEKLSKLQKLELRQLSNVKEITPELLPESMKKDAELVMVGMTGLEKLNLSGLNRQTLDGIDVNSITHLTSFDISHNSLDLSEKSEDRKLLMTLMEQVSNHQKITVKNTAFENQKPKGYYPQTYDTKEGHYDVDNAEHDILTDFVFGTVTKRNTFIGDEEAFAIYKEGAVDGRQYVSKDYTYEAFRKDYKGYKVHLTASNLGETVTSKVTATTDETYLVDVSDGEKVVHHMKLNIGSGAIMMENLAKGAKVIGTSGDFEQAKKIFDGEKSDRFFTWGQTNWIAFDLGEINLAKEWRLFNAETNTEIKTDSSLNVAKGRLQILKDTTIDLEKMDIKNRKEYLSNDENWTDVAQMDDAKAIFNSKLSNVLSRYWRFCVDGGASSYYPQYTELQILGQRLSNDVANTLKDGGAQQKYQPTEANLKARSEFQDNKFGIFLHWGLYAMLATGEWTMTNNNLNYKEYAKLAGGFYPSKFDADKWVAAIKASGAKYICFTTRHHEGFSMFDTKYSDYNIVKATPFKRDVVKELADACAKHGIKLHFYYSHIDWYREDAPQGRTGRRTGRPNPKGDWKSYYQFMNNQLTELLTNYGPIGAIWFDGWWDQDINPDFDWELPEQYALIHRLQPACLVGNNHHQTPFAGEDIQIFERDLPGENTAGLSGQSVSHLPLETCETMNGMWGYKITDQNYKSTKTLIHYLVKAAGKDANLLMNIGPQPDGELPEVAVQRLKEVGEWMSKYGETIYGTRGGLVAPHDWGVTTQKGNKLYVHILNLQDKALFLPIVDKKVKKAVVFADKTPVRFTKNKEGIVLELAKVPTDVDYVVELTID

SEQ ID NO: 5 - DNA, 4260 bp, Artificial Sequence
  SYNTHETIC FUSION PROTEN
atgggcagcagccatcatcatcatcatcacagcagcggcctggtgccgcgcggcagccatatgacccaccatgattcactcaatactgtaaaagcggaggagaagactgttcaggttcagaaaggattaccttctatcgatagcttgcattatctgtcagagaatagcaaaaaagaatttaaagaagaactctcaaaagcggggcaagaatctcaaaaggtcaaagagatattagcaaaagctcagcaggcagataaacaagctcaagaacttgccaaaatgaaaattcctgagaaaataccgatgaaaccgttacatggttctctctacggtggttactttagaacttggcatgacaaaacatcagatccaacagaaaaagacaaagttaactcgatgggagagcttcctaaagaagtagatctagcctttattttccacgattggacaaaagattatagccttttttggaaagaattggccaccaaacatgtgccaaagttaaacaagcaagggacacgtgtcattcgtaccattccatggcgtttcctagctgggggtgataacagtggtattgcagaagataccagtaaatacccaaatacaccagagggaaataaagctttagccaaagctattgttgatgaatatgtttataaatacaaccttgatggcttagatgtggatgttgaacatgatagtattccaaaagttgacaaaaaagaagatacagcaggcgtagaacgctctattcaagtgtttgaagaaattgggaaattaattggaccaaaaggtgttgataaatcgcggttatttattatggatagcacctacatggctgataaaaacccattgattgagcgaggagctccttatattaatttattactggtacaggtctatggttcacaaggagagaaaggtggttgggagcctgtttctaatcgacctgaaaaaacaatggaagaacgatggcaaggttatagcaagtatattcgtcctgaacaatacatgattggtttttctttctatgaggaaaatgctcaagaagggaatctttggtatgatattaattctcgcaaggacgaggacaaagcaaatggaattaacactgacataactggaacgcgtgccgaacggtatgcaaggtggcaacctaagacaggtggggttaagggaggtatcttctcctacgctattgaccgagatggtgtagctcatcaacctaaaaaatatgctaaacagaaagagtttaaggacgcaactgataacatcttccactcagattatagtgtctccaaggcattaaagacagttatgctaaaagataagtcgtatgatctgattgatgagaaagatttcccagataaggctttgcgagaagctgtgatggcgcaggttggaaccagaaaaggtgatttggaacgtttcaatggcacattacgattggataatccagcgattcaaagtttagaaggtctaaataaatttaaaaaattagctcaattagacttgattggcttatctcgcattacaaagctcgaccgttctgttttacccgctaatatgaagccaggcaaagataccttggaaacagttcttgaaacctataaaaaggataacaaagaagaacctgctactatcccaccagtatctttgaaggtttctggtttaactggtctgaaagaattagatttgtcaggttttgaccgtgaaaccttggctggtcttgatgccgctactctaacgtctttagaaaaagttgatatttctggcaacaaacttgatttggctccaggaacagaaaatcgacaaatttttgatactatgctatcaactatcagcaatcatgttggaagcaatgaacaaacagtgaaatttgacaagcaaaaaccaactgggcattacccagatacctatgggaaaactagtctgcgcttaccagtggcaaatgaaaaagttgatttgcaaagccagcttttgtttgggactgtgacaaatcaaggaaccctaatcaatagcgaagcagactataaggcttaccaaaatcataaaattgctggacgtagctttgttgattcaaactatcattacaataactttaaagtttcttatgagaactataccgttaaagtaactgattccacattgggaaccactactgacaaaacgctagcaactgataaagaagagacctataaggttgacttctttagcccagcagataagacaaaagctgttcatactgctaaagtgattgttggtgacgaaaaaaccatgatggttaatttggcagaaggcgcaacagttattggaggaagtgctgatcctgtaaatgcaagaaaggtatttgatgggcaactgggcagtgagactgataatatctctttaggatgggattctaagcaaagtattatatttaaattgaaagaagatggattaataaagcattggcgtttcttcaatgattcagcccgaaatcctgagacaaccaataaacctattcaggaagcaagtctacaaatttttaatatcaaagattataatctagataatttgttggaaaatcccaataaatttgatgatgaaaaatattggattactgtagatacttacagtgcacaaggagagagagctactgcattcagtaatacattaaataatattactagtaaatattggcgagttgtctttgatactaaaggagatagatatagttcgccagtagtccctgaactccaaattttaggttatccgttacctaacgccgacactatcatgaaaacagtaactactgctaaagagttatctcaacaaaaagataagttttctcaaaagatgcttgatgagttaaaaataaaagagatggctttagaaacttctttgaacagtaagatttttgatgtaactgctattaatgctaatgctggagttttgaaagattgtattgagaaaaggcagctgctaaaaaaaggatccggtgctcagcaaaagtatcaaccgacagaggctaacctgaaagcccggagtgaatttcaggacaataagtttggaatcttccttcattggggactctatgccatgctcgctaccggagagtggacgatgacaaacaataacctgaattataaagagtatgccaaactggccgggggattctatccttcgaagtttgatgcagacaaatgggtagcagccatcaaggcttccggagctaaatatatttgcttcactactcgtcatcacgagggattctcgatgttcgataccaagtactctgattataacattgtaaaagcgactcctttcaaacgtgatgtggtgaaggagctggccgatgcatgtgccaaacatggcatcaaacttcacttctattattcacatatagactggtatcgtgaagatgctcctcagggaagaaccggacgtagaaccggacgtcccaatccgaaaggagattggaagagctattatcagtttatgaataatcagttgacagagctgctgactaattatggtccgatcggcgctatctggtttgacggttggtgggatcaggacatcaatcccgatttcgattgggaacttcccgagcaatatgcacttattcatcgtttgcagccggcttgcctggtaggtaacaaccaccatcagacaccttttgccggagaagatattcaaatcttcgagcgtgatttgccgggagagaatactgcaggactttcgggacaaagcgtcagccatctgcctcttgaaacatgtgagacgatgaatggtatgtggggatacaagattacagatcagaattataaatcgactaaaactttgattcactatctggtgaaagctgccggtaaagatgcaaatctgttgatgaacatcggtccgcaacctgatggtgaacttccggaagtggccgttcagcgcttgaaggaagtgggagagtggatgtcgaaatatggtgaaactatttatggaaccagaggcggtctggttgctccgcatgattggggagtaacgactcaaaaaggcaataaactttatgtacacattcttaatttacaggataaggcactcttcttgcctattgtcgataagaaagtgaaaaaggcggtggtctttgctgacaaaacaccggtacgtttcacaaagaataaggaaggaattgtactggaacttgctaaagttccaacggatgtagactacgtggtagaacttacaattgacggtacctggtctcatccgcagttcgagaaataa

SEQ ID NO: 6 - protein, 1419 aa, Artificial Sequence
  SYNTHETIC FUSION PROTEN
MGSSHHHHHHSSGLVPRGSHMTHHDSLNTVKAEEKTVQVQKGLPSIDSLHYLSENSKKEFKEELSKAGQESQKVKEILAKAQQADKQAQELAKMKIPEKIPMKPLHGSLYGGYFRTWHDKTSDPTEKDKVNSMGELPKEVDLAFIFHDWTKDYSLFWKELATKHVPKLNKQGTRVIRTIPWRFLAGGDNSGIAEDTSKYPNTPEGNKALAKAIVDEYVYKYNLDGLDVDVEHDSIPKVDKKEDTAGVERSIQVFEEIGKLIGPKGVDKSRLFIMDSTYMADKNPLIERGAPYINLLLVQVYGSQGEKGGWEPVSNRPEKTMEERWQGYSKYIRPEQYMIGFSFYEENAQEGNLWYDINSRKDEDKANGINTDITGTRAERYARWQPKTGGVKGGIFSYAIDRDGVAHQPKKYAKQKEFKDATDNIFHSDYSVSKALKTVMLKDKSYDLIDEKDFPDKALREAVMAQVGTRKGDLERFNGTLRLDNPAIQSLEGLNKFKKLAQLDLIGLSRITKLDRSVLPANMKPGKDTLETVLETYKKDNKEEPATIPPVSLKVSGLTGLKELDLSGFDRETLAGLDAATLTSLEKVDISGNKLDLAPGTENRQIFDTMLSTISNHVGSNEQTVKFDKQKPTGHYPDTYGKTSLRLPVANEKVDLQSQLLFGTVTNQGTLINSEADYKAYQNHKIAGRSFVDSNYHYNNFKVSYENYTVKVTDSTLGTTTDKTLATDKEETYKVDFFSPADKTKAVHTAKVIVGDEKTMMVNLAEGATVIGGSADPVNARKVFDGQLGSETDNISLGWDSKQSIIFKLKEDGLIKHWRFFNDSARNPETTNKPIQEASLQIFNIKDYNLDNLLENPNKFDDEKYWITVDTYSAQGERATAFSNTLNNITSKYWRVVFDTKGDRYSSPVVPELQILGYPLPNADTIMKTVTTAKELSQQKDKFSQKMLDELKIKEMALETSLNSKIFDVTAINANAGVLKDCIEKRQLLKKGSGAQQKYQPTEANLKARSEFQDNKFGIFLHWGLYAMLATGEWTMTNNNLNYKEYAKLAGGFYPSKFDADKWVAAIKASGAKYICFTTRHHEGFSMFDTKYSDYNIVKATPFKRDVVKELADACAKHGIKLHFYYSHIDWYREDAPQGRTGRRTGRPNPKGDWKSYYQFMNNQLTELLTNYGPIGAIWFDGWWDQDINPDFDWELPEQYALIHRLQPACLVGNNHHQTPFAGEDIQIFERDLPGENTAGLSGQSVSHLPLETCETMNGMWGYKITDQNYKSTKTLIHYLVKAAGKDANLLMNIGPQPDGELPEVAVQRLKEVGEWMSKYGETIYGTRGGLVAPHDWGVTTQKGNKLYVHILNLQDKALFLPIVDKKVKKAVVFADKTPVRFTKNKEGIVLELAKVPTDVDYVVELTIDGTWSHPQFEK

SEQ ID NO: 7 - DNA, 4260 bp, Artificial Sequence
  SYNTHETIC FUSION PROTEN
atgggcagcagccatcatcatcatcatcacagcagcggcctggtgccgcgcggcagccatatgacccaccatgattcactcaatactgtaaaagcggaggagaagactgttcaggttcagaaaggattaccttctatcgatagcttgcattatctgtcagagaatagcaaaaaagaatttaaagaagaactctcaaaagcggggcaagaatctcaaaaggtcaaagagatattagcaaaagctcagcaggcagataaacaagctcaagaacttgccaaaatgaaaattcctgagaaaataccgatgaaaccgttacatggttctctctacggtggttactttagaacttggcatgacaaaacatcagatccaacagaaaaagacaaagttaactcgatgggagagcttcctaaagaagtagatctagcctttattttccacgattggacaaaagattatagccttttttggaaagaattggccaccaaacatgtgccaaagttaaacaagcaagggacacgtgtcattcgtaccattccatggcgtttcctagctgggggtgataacagtggtattgcagaagataccagtaaatacccaaatacaccagagggaaataaagctttagccaaagctattgttgatgaatatgtttataaatacaaccttgatggcttagatgtgcaggttgaacatgatagtattccaaaagttgacaaaaaagaagatacagcaggcgtagaacgctctattcaagtgtttgaagaaattgggaaattaattggaccaaaaggtgttgataaatcgcggttatttattatggatagcacctacatggctgataaaaacccattgattgagcgaggagctccttatattaatttattactggtacaggtctatggttcacaaggagagaaaggtggttgggagcctgtttctaatcgacctgaaaaaacaatggaagaacgatggcaaggttatagcaagtatattcgtcctgaacaatacatgattggtttttctttctatgaggaaaatgctcaagaagggaatctttggtatgatattaattctcgcaaggacgaggacaaagcaaatggaattaacactgacataactggaacgcgtgccgaacggtatgcaaggtggcaacctaagacaggtggggttaagggaggtatcttctcctacgctattgaccgagatggtgtagctcatcaacctaaaaaatatgctaaacagaaagagtttaaggacgcaactgataacatcttccactcagattatagtgtctccaaggcattaaagacagttatgctaaaagataagtcgtatgatctgattgatgagaaagatttcccagataaggctttgcgagaagctgtgatggcgcaggttggaaccagaaaaggtgatttggaacgtttcaatggcacattacgattggataatccagcgattcaaagtttagaaggtctaaataaatttaaaaaattagctcaattagacttgattggcttatctcgcattacaaagctcgaccgttctgttttacccgctaatatgaagccaggcaaagataccttggaaacagttcttgaaacctataaaaaggataacaaagaagaacctgctactatcccaccagtatctttgaaggtttctggtttaactggtctgaaagaattagatttgtcaggttttgaccgtgaaaccttggctggtcttgatgccgctactctaacgtctttagaaaaagttgatatttctggcaacaaacttgatttggctccaggaacagaaaatcgacaaatttttgatactatgctatcaactatcagcaatcatgttggaagcaatgaacaaacagtgaaatttgacaagcaaaaaccaactgggcattacccagatacctatgggaaaactagtctgcgcttaccagtggcaaatgaaaaagttgatttgcaaagccagcttttgtttgggactgtgacaaatcaaggaaccctaatcaatagcgaagcagactataaggcttaccaaaatcataaaattgctggacgtagctttgttgattcaaactatcattacaataactttaaagtttcttatgagaactataccgttaaagtaactgattccacattgggaaccactactgacaaaacgctagcaactgataaagaagagacctataaggttgacttctttagcccagcagataagacaaaagctgttcatactgctaaagtgattgttggtgacgaaaaaaccatgatggttaatttggcagaaggcgcaacagttattggaggaagtgctgatcctgtaaatgcaagaaaggtatttgatgggcaactgggcagtgagactgataatatctctttaggatgggattctaagcaaagtattatatttaaattgaaagaagatggattaataaagcattggcgtttcttcaatgattcagcccgaaatcctgagacaaccaataaacctattcaggaagcaagtctacaaatttttaatatcaaagattataatctagataatttgttggaaaatcccaataaatttgatgatgaaaaatattggattactgtagatacttacagtgcacaaggagagagagctactgcattcagtaatacattaaataatattactagtaaatattggcgagttgtctttgatactaaaggagatagatatagttcgccagtagtccctgaactccaaattttaggttatccgttacctaacgccgacactatcatgaaaacagtaactactgctaaagagttatctcaacaaaaagataagttttctcaaaagatgcttgatgagttaaaaataaaagagatggctttagaaacttctttgaacagtaagatttttgatgtaactgctattaatgctaatgctggagttttgaaagattgtattgagaaaaggcagctgctaaaaaaaggatccggtgctcagcaaaagtatcaaccgacagaggctaacctgaaagcccggagtgaatttcaggacaataagtttggaatcttccttcattggggactctatgccatgctcgctaccggagagtggacgatgacaaacaataacctgaattataaagagtatgccaaactggccgggggattctatccttcgaagtttgatgcagacaaatgggtagcagccatcaaggcttccggagctaaatatatttgcttcactactcgtcatcacgagggattctcgatgttcgataccaagtactctgattataacattgtaaaagcgactcctttcaaacgtgatgtggtgaaggagctggccgatgcatgtgccaaacatggcatcaaacttcacttctattattcacatatagactggtatcgtgaagatgctcctcagggaagaaccggacgtagaaccggacgtcccaatccgaaaggagattggaagagctattatcagtttatgaataatcagttgacagagctgctgactaattatggtccgatcggcgctatctggtttgacggttggtgggatcaggacatcaatcccgatttcgattgggaacttcccgagcaatatgcacttattcatcgtttgcagccggcttgcctggtaggtaacaaccaccatcagacaccttttgccggagaagatattcaaatcttcgagcgtgatttgccgggagagaatactgcaggactttcgggacaaagcgtcagccatctgcctcttgaaacatgtgagacgatgaatggtatgtggggatacaagattacagatcagaattataaatcgactaaaactttgattcactatctggtgaaagctgccggtaaagatgcaaatctgttgatgaacatcggtccgcaacctgatggtgaacttccggaagtggccgttcagcgcttgaaggaagtgggagagtggatgtcgaaatatggtgaaactatttatggaaccagaggcggtctggttgctccgcatgattggggagtaacgactcaaaaaggcaataaactttatgtacacattcttaatttacaggataaggcactcttcttgcctattgtcgataagaaagtgaaaaaggcggtggtctttgctgacaaaacaccggtacgtttcacaaagaataaggaaggaattgtactggaacttgctaaagttccaacggatgtagactacgtggtagaacttacaattgacggtacctggtctcatccgcagttcgagaaataa

SEQ ID NO: 8 - protein, 1419 aa, Artificial Sequence
  SYNTHETIC FUSION PROTEN
MGSSHHHHHHSSGLVPRGSHMTHHDSLNTVKAEEKTVQVQKGLPSIDSLHYLSENSKKEFKEELSKAGQESQKVKEILAKAQQADKQAQELAKMKIPEKIPMKPLHGSLYGGYFRTWHDKTSDPTEKDKVNSMGELPKEVDLAFIFHDWTKDYSLFWKELATKHVPKLNKQGTRVIRTIPWRFLAGGDNSGIAEDTSKYPNTPEGNKALAKAIVDEYVYKYNLDGLDVQVEHDSIPKVDKKEDTAGVERSIQVFEEIGKLIGPKGVDKSRLFIMDSTYMADKNPLIERGAPYINLLLVQVYGSQGEKGGWEPVSNRPEKTMEERWQGYSKYIRPEQYMIGFSFYEENAQEGNLWYDINSRKDEDKANGINTDITGTRAERYARWQPKTGGVKGGIFSYAIDRDGVAHQPKKYAKQKEFKDATDNIFHSDYSVSKALKTVMLKDKSYDLIDEKDFPDKALREAVMAQVGTRKGDLERFNGTLRLDNPAIQSLEGLNKFKKLAQLDLIGLSRITKLDRSVLPANMKPGKDTLETVLETYKKDNKEEPATIPPVSLKVSGLTGLKELDLSGFDRETLAGLDAATLTSLEKVDISGNKLDLAPGTENRQIFDTMLSTISNHVGSNEQTVKFDKQKPTGHYPDTYGKTSLRLPVANEKVDLQSQLLFGTVTNQGTLINSEADYKAYQNHKIAGRSFVDSNYHYNNFKVSYENYTVKVTDSTLGTTTDKTLATDKEETYKVDFFSPADKTKAVHTAKVIVGDEKTMMVNLAEGATVIGGSADPVNARKVFDGQLGSETDNISLGWDSKQSIIFKLKEDGLIKHWRFFNDSARNPETTNKPIQEASLQIFNIKDYNLDNLLENPNKFDDEKYWITVDTYSAQGERATAFSNTLNNITSKYWRVVFDTKGDRYSSPVVPELQILGYPLPNADTIMKTVTTAKELSQQKDKFSQKMLDELKIKEMALETSLNSKIFDVTAINANAGVLKDCIEKRQLLKKGSGAQQKYQPTEANLKARSEFQDNKFGIFLHWGLYAMLATGEWTMTNNNLNYKEYAKLAGGFYPSKFDADKWVAAIKASGAKYICFTTRHHEGFSMFDTKYSDYNIVKATPFKRDVVKELADACAKHGIKLHFYYSHIDWYREDAPQGRTGRRTGRPNPKGDWKSYYQFMNNQLTELLTNYGPIGAIWFDGWWDQDINPDFDWELPEQYALIHRLQPACLVGNNHHQTPFAGEDIQIFERDLPGENTAGLSGQSVSHLPLETCETMNGMWGYKITDQNYKSTKTLIHYLVKAAGKDANLLMNIGPQPDGELPEVAVQRLKEVGEWMSKYGETIYGTRGGLVAPHDWGVTTQKGNKLYVHILNLQDKALFLPIVDKKVKKAVVFADKTPVRFTKNKEGIVLELAKVPTDVDYVVELTIDGTWSHPQFEK

SEQ ID NO: 9 - DNA, 3927 bp, Artificial Sequence
  SYNTHETIC FUSION PROTEN
atgggcagcagccatcatcatcatcatcacagcagcggcctggtgccgcgcggcagccatatgggatccatggataaacatttgttggtaaaaagaacactagggtgtgtttgtgctgcaacgttgatgggagctgccttagcgacccaccatgattcactcaatactgtaaaagcggaggagaagactgttcaaacaggaaagacagatcagcaggttggtgctaaattggtacaggaaatccgtgaaggaaaacgcggaccactatatgctggttattttaggacatggcatgatcgtgcttcaacaggaatagatggtaaacagcaacatccagaaaatactatggctgaggtcccaaaagaagttgatatcttatttgtttttcatgaccatacagcttcagatagtccattttggtctgaattaaaggacagttatgtccataaattacatcaacagggaacggcacttgttcagacaattggtgttaacgaattaaatggacgtacaggtttatctaaagattatcctgatactcctgaggggaacaaagctttagcagcagccattgtcaaggcatttgtaactgatcgtggtgtcgatggactagatattgatattgagcacgaatttacgaacaaaagaacacctgaagaagatgctcgtgctctaaatgtttttaaagagattgcgcagttaataggtaaaaatggtagtgataaatctaaattgctcatcatggacactaccctaagtgttgaaaataatccaatatttaaagggatagcggaagatcttgattatcttcttagacaatattatggttcacaaggtggagaagctgaagtggatactataaactctgattggaaccaatatcagaattatattgatgctagccagttcatgattggattctccttttttgaagaatctgcgtccaaagggaatttatggtttgatgttaacgaatacgaccctaacaatcctgaaaaagggaaagatattgaaggaacacgtgctaaaaaatatgcagagtggcaacctagtacaggtggtttaaaagcaggtatattctcttatgctattgatcgtgatggagtggctcatgttccttcaacatataaaaataggactagtacaaatttacaacggcatgaagtcgataatatctcacatactgactacaccgtatctcgaaaattaaaaacattgatgaccgaagacaaacgctatgatgtcattgatcaaaaagacattcctgacccagcattaagagaacaaatcattcaacaagttggacagtataaaggcgatttggaacgttataacaagacattggtgcttacaggagataagattcaaaatcttaaaggactagaaaaattaagcaagttacaaaaattagagttgcgccagctatctaacgttaaagaaattactccagaacttttgccggaaagcatgaaaaaagatgctgagcttgttatggtaggcatgactggtttagaaaaactaaaccttagtggtctaaatcgtcaaactttagacggtatagacgtgaatagtattacgcatttgacatcatttgatatttcacataatagtttggacttgtcggaaaagagtgaagaccgtaaactattaatgactttgatggagcaggtttcaaatcatcaaaaaataacggtgaaaaatacggcttttgaaaatcaaaaaccgaaaggttattatcctcagacgtatgataccaaagaaggtcattatgatgttgataatgcagaacatgatattttaactgattttgtttttggaactgttactaaacgtaatacctttattggagacgaagaagcatttgctatctataaagaaggagctgtcgatggtcgacaatatgtgtctaaagactatacttatgaagcttttcgtaaagactataaaggttacaaggttcatttaactgcttctaacctaggagaaacagttacttctaaggtaactgctactactgatgaaacttacttagtagatgtttctgatggggaaaaagttgttcaccacatgaaactcaatataggatctggtgccatcatgatggaaaatctggcaaaaggggctaaagtgattggtacatctggggactttgagcaagcaaagaagattttcgatggtgaaaagtcagatagattcttcacttggggacaaactaactggatagcttttgatctaggagaaattaatcttgcgaaggaatggcgtttatttaatgcagagacaaatactgaaataaagacagatagtagcttaaacgtggctaaaggacgtcttcagattttaaaagatacaactattgatttagaaaaaatggacataaaaaatcgtaaagagtatctgtcgaatgatgaaaattggactgatgttgctcagatggatgatgcaaaagcgatatttaatagtaaattatccaatgttttatctcggtattggcggttttgtgtagatggtggagctagctcttattaccctcaatataccgaacttcaaatcctcggacaacgtttatcaaatgatgtcgctaatacgctgaaggatgaattcatgggcagcagccatcatcaccatcaccatgagctccccgggccgcgggaaaacctgtattttcagggagcgatcgctcagcaaaagtatcaaccgacagaggctaacctgaaagcccggagtgaatttcaggacaataagtttggaatcttccttcattggggactctatgccatgctcgctaccggagagtggacgatgacaaacaataacctgaattataaagagtatgccaaactggccgggggattctatccttcgaagtttgatgcagacaaatgggtagcagccatcaaggcttccggagctaaatatatttgcttcactactcgtcatcacgagggattctcgatgttcgataccaagtactctgattataacattgtaaaagcgactcctttcaaacgtgatgtggtgaaggagctggccgatgcatgtgccaaacatggcatcaaacttcacttctattattcacatatagactggtatcgtgaagatgctcctcagggaagaaccggacgtagaaccggacgtcccaatccgaaaggagattggaagagctattatcagtttatgaataatcagttgacagagctgctgactaattatggtccgatcggcgctatctggtttgacggttggtgggatcaggacatcaatcccgatttcgattgggaacttcccgagcaatatgcacttattcatcgtttgcagccggcttgcctggtaggtaacaaccaccatcagacaccttttgccggagaagatattcaaatcttcgagcgtgatttgccgggagagaatactgcaggactttcgggacaaagcgtcagccatctgcctcttgaaacatgtgagacgatgaatggtatgtggggatacaagattacagatcagaattataaatcgactaaaactttgattcactatctggtgaaagctgccggtaaagatgcaaatctgttgatgaacatcggtccgcaacctgatggtgaacttccggaagtggccgttcagcgcttgaaggaagtgggagagtggatgtcgaaatatggtgaaactatttatggaaccagaggcggtctggttgctccgcatgattggggagtaacgactcaaaaaggcaataaactttatgtacacattcttaatttacaggataaggcactcttcttgcctattgtcgataagaaagtgaaaaaggcggtggtctttgctgacaaaacaccggtacgtttcacaaagaataaggaaggaattgtactggaacttgctaaagttccaacggatgtagactacgtggtagaacttacaattgactaa

SEQ ID NO: 10 - protein, 1308 aa, Artificial Sequence
  SYNTHETIC FUSION PROTEN
MGSSHHHHHHSSGLVPRGSHMGSMDKHLLVKRTLGCVCAATLMGAALATHHDSLNTVKAEEKTVQTGKTDQQVGAKLVQEIREGKRGPLYAGYFRTWHDRASTGIDGKQQHPENTMAEVPKEVDILFVFHDHTASDSPFWSELKDSYVHKLHQQGTALVQTIGVNELNGRTGLSKDYPDTPEGNKALAAAIVKAFVTDRGVDGLDIDIEHEFTNKRTPEEDARALNVFKEIAQLIGKNGSDKSKLLIMDTTLSVENNPIFKGIAEDLDYLLRQYYGSQGGEAEVDTINSDWNQYQNYIDASQFMIGFSFFEESASKGNLWFDVNEYDPNNPEKGKDIEGTRAKKYAEWQPSTGGLKAGIFSYAIDRDGVAHVPSTYKNRTSTNLQRHEVDNISHTDYTVSRKLKTLMTEDKRYDVIDQKDIPDPALREQIIQQVGQYKGDLERYNKTLVLTGDKIQNLKGLEKLSKLQKLELRQLSNVKEITPELLPESMKKDAELVMVGMTGLEKLNLSGLNRQTLDGIDVNSITHLTSFDISHNSLDLSEKSEDRKLLMTLMEQVSNHQKITVKNTAFENQKPKGYYPQTYDTKEGHYDVDNAEHDILTDFVFGTVTKRNTFIGDEEAFAIYKEGAVDGRQYVSKDYTYEAFRKDYKGYKVHLTASNLGETVTSKVTATTDETYLVDVSDGEKVVHHMKLNIGSGAIMMENLAKGAKVIGTSGDFEQAKKIFDGEKSDRFFTWGQTNWIAFDLGEINLAKEWRLFNAETNTEIKTDSSLNVAKGRLQILKDTTIDLEKMDIKNRKEYLSNDENWTDVAQMDDAKAIFNSKLSNVLSRYWRFCVDGGASSYYPQYTELQILGQRLSNDVANTLKDEFMGSSHHHHHHELPGPRENLYFQGAIAQQKYQPTEANLKARSEFQDNKFGIFLHWGLYAMLATGEWTMTNNNLNYKEYAKLAGGFYPSKFDADKWVAAIKASGAKYICFTTRHHEGFSMFDTKYSDYNIVKATPFKRDVVKELADACAKHGIKLHFYYSHIDWYREDAPQGRTGRRTGRPNPKGDWKSYYQFMNNQLTELLTNYGPIGAIWFDGWWDQDINPDFDWELPEQYALIHRLQPACLVGNNHHQTPFAGEDIQIFERDLPGENTAGLSGQSVSHLPLETCETMNGMWGYKITDQNYKSTKTLIHYLVKAAGKDANLLMNIGPQPDGELPEVAVQRLKEVGEWMSKYGETIYGTRGGLVAPHDWGVTTQKGNKLYVHILNLQDKALFLPIVDKKVKKAVVFADKTPVRFTKNKEGIVLELAKVPTDVDYVVELTID

SEQ ID NO: 11 - DNA, 3927 bp, Artificial Sequence
  SYNTHETIC FUSION PROTEN
atgggcagcagccatcatcatcatcatcacagcagcggcctggtgccgcgcggcagccatatgggatccatggataaacatttgttggtaaaaagaacactagggtgtgtttgtgctgcaacgttgatgggagctgccttagcgacccaccatgattcactcaatactgtaaaagcggaggagaagactgttcaaacaggaaagacagatcagcaggttggtgctaaattggtacaggaaatccgtgaaggaaaacgcggaccactatatgctggttattttaggacatggcatgatcgtgcttcaacaggaatagatggtaaacagcaacatccagaaaatactatggctgaggtcccaaaagaagttgatatcttatttgtttttcatgaccatacagcttcagatagtccattttggtctgaattaaaggacagttatgtccataaattacatcaacagggaacggcacttgttcaggaaattggtgttaacgaattaaatggacgtacaggtttatctaaagattatcctgatactcctgaggggaacaaagctttagcagcagccattgtcaaggcatttgtaactgatcgtggtgtcgatggactagatattgatattgagcacgaatttacgaacaaaagaacacctgaagaagatgctcgtgctctaaatgtttttaaagagattgcgcagttaataggtaaaaatggtagtgataaatctaaattgctcatcatggacactaccctaagtgttgaaaataatccaatatttaaagggatagcggaagatcttgattatcttcttagacaatattatggttcacaaggtggagaagctgaagtggatactataaactctgattggaaccaatatcagaattatattgatgctagccagttcatgattggattctccttttttgaagaatctgcgtccaaagggaatttatggtttgatgttaacgaatacgaccctaacaatcctgaaaaagggaaagatattgaaggaacacgtgctaaaaaatatgcagagtggcaacctagtacaggtggtttaaaagcaggtatattctcttatgctattgatcgtgatggagtggctcatgttccttcaacatataaaaataggactagtacaaatttacaacggcatgaagtcgataatatctcacatactgactacaccgtatctcgaaaattaaaaacattgatgaccgaagacaaacgctatgatgtcattgatcaaaaagacattcctgacccagcattaagagaacaaatcattcaacaagttggacagtataaaggcgatttggaacgttataacaagacattggtgcttacaggagataagattcaaaatcttaaaggactagaaaaattaagcaagttacaaaaattagagttgcgccagctatctaacgttaaagaaattactccagaacttttgccggaaagcatgaaaaaagatgctgagcttgttatggtaggcatgactggtttagaaaaactaaaccttagtggtctaaatcgtcaaactttagacggtatagacgtgaatagtattacgcatttgacatcatttgatatttcacataatagtttggacttgtcggaaaagagtgaagaccgtaaactattaatgactttgatggagcaggtttcaaatcatcaaaaaataacggtgaaaaatacggcttttgaaaatcaaaaaccgaaaggttattatcctcagacgtatgataccaaagaaggtcattatgatgttgataatgcagaacatgatattttaactgattttgtttttggaactgttactaaacgtaatacctttattggagacgaagaagcatttgctatctataaagaaggagctgtcgatggtcgacaatatgtgtctaaagactatacttatgaagcttttcgtaaagactataaaggttacaaggttcatttaactgcttctaacctaggagaaacagttacttctaaggtaactgctactactgatgaaacttacttagtagatgtttctgatggggaaaaagttgttcaccacatgaaactcaatataggatctggtgccatcatgatggaaaatctggcaaaaggggctaaagtgattggtacatctggggactttgagcaagcaaagaagattttcgatggtgaaaagtcagatagattcttcacttggggacaaactaactggatagcttttgatctaggagaaattaatcttgcgaaggaatggcgtttatttaatgcagagacaaatactgaaataaagacagatagtagcttaaacgtggctaaaggacgtcttcagattttaaaagatacaactattgatttagaaaaaatggacataaaaaatcgtaaagagtatctgtcgaatgatgaaaattggactgatgttgctcagatggatgatgcaaaagcgatatttaatagtaaattatccaatgttttatctcggtattggcggttttgtgtagatggtggagctagctcttattaccctcaatataccgaacttcaaatcctcggacaacgtttatcaaatgatgtcgctaatacgctgaaggatgaattcatgggcagcagccatcatcaccatcaccatgagctccccgggccgcgggaaaacctgtattttcagggagcgatcgctcagcaaaagtatcaaccgacagaggctaacctgaaagcccggagtgaatttcaggacaataagtttggaatcttccttcattggggactctatgccatgctcgctaccggagagtggacgatgacaaacaataacctgaattataaagagtatgccaaactggccgggggattctatccttcgaagtttgatgcagacaaatgggtagcagccatcaaggcttccggagctaaatatatttgcttcactactcgtcatcacgagggattctcgatgttcgataccaagtactctgattataacattgtaaaagcgactcctttcaaacgtgatgtggtgaaggagctggccgatgcatgtgccaaacatggcatcaaacttcacttctattattcacatatagactggtatcgtgaagatgctcctcagggaagaaccggacgtagaaccggacgtcccaatccgaaaggagattggaagagctattatcagtttatgaataatcagttgacagagctgctgactaattatggtccgatcggcgctatctggtttgacggttggtgggatcaggacatcaatcccgatttcgattgggaacttcccgagcaatatgcacttattcatcgtttgcagccggcttgcctggtaggtaacaaccaccatcagacaccttttgccggagaagatattcaaatcttcgagcgtgatttgccgggagagaatactgcaggactttcgggacaaagcgtcagccatctgcctcttgaaacatgtgagacgatgaatggtatgtggggatacaagattacagatcagaattataaatcgactaaaactttgattcactatctggtgaaagctgccggtaaagatgcaaatctgttgatgaacatcggtccgcaacctgatggtgaacttccggaagtggccgttcagcgcttgaaggaagtgggagagtggatgtcgaaatatggtgaaactatttatggaaccagaggcggtctggttgctccgcatgattggggagtaacgactcaaaaaggcaataaactttatgtacacattcttaatttacaggataaggcactcttcttgcctattgtcgataagaaagtgaaaaaggcggtggtctttgctgacaaaacaccggtacgtttcacaaagaataaggaaggaattgtactggaacttgctaaagttccaacggatgtagactacgtggtagaacttacaattgactaa

SEQ ID NO: 12 - protein, 1308 aa, Artificial Sequence
  SYNTHETIC FUSION PROTEN
MGSSHHHHHHSSGLVPRGSHMGSMDKHLLVKRTLGCVCAATLMGAALATHHDSLNTVKAEEKTVQTGKTDQQVGAKLVQEIREGKRGPLYAGYFRTWHDRASTGIDGKQQHPENTMAEVPKEVDILFVFHDHTASDSPFWSELKDSYVHKLHQQGTALVQEIGVNELNGRTGLSKDYPDTPEGNKALAAAIVKAFVTDRGVDGLDIDIEHEFTNKRTPEEDARALNVFKEIAQLIGKNGSDKSKLLIMDTTLSVENNPIFKGIAEDLDYLLRQYYGSQGGEAEVDTINSDWNQYQNYIDASQFMIGFSFFEESASKGNLWFDVNEYDPNNPEKGKDIEGTRAKKYAEWQPSTGGLKAGIFSYAIDRDGVAHVPSTYKNRTSTNLQRHEVDNISHTDYTVSRKLKTLMTEDKRYDVIDQKDIPDPALREQIIQQVGQYKGDLERYNKTLVLTGDKIQNLKGLEKLSKLQKLELRQLSNVKEITPELLPESMKKDAELVMVGMTGLEKLNLSGLNRQTLDGIDVNSITHLTSFDISHNSLDLSEKSEDRKLLMTLMEQVSNHQKITVKNTAFENQKPKGYYPQTYDTKEGHYDVDNAEHDILTDFVFGTVTKRNTFIGDEEAFAIYKEGAVDGRQYVSKDYTYEAFRKDYKGYKVHLTASNLGETVTSKVTATTDETYLVDVSDGEKVVHHMKLNIGSGAIMMENLAKGAKVIGTSGDFEQAKKIFDGEKSDRFFTWGQTNWIAFDLGEINLAKEWRLFNAETNTEIKTDSSLNVAKGRLQILKDTTIDLEKMDIKNRKEYLSNDENWTDVAQMDDAKAIFNSKLSNVLSRYWRFCVDGGASSYYPQYTELQILGQRLSNDVANTLKDEFMGSSHHHHHHELPGPRENLYFQGAIAQQKYQPTEANLKARSEFQDNKFGIFLHWGLYAMLATGEWTMTNNNLNYKEYAKLAGGFYPSKFDADKWVAAIKASGAKYICFTTRHHEGFSMFDTKYSDYNIVKATPFKRDVVKELADACAKHGIKLHFYYSHIDWYREDAPQGRTGRRTGRPNPKGDWKSYYQFMNNQLTELLTNYGPIGAIWFDGWWDQDINPDFDWELPEQYALIHRLQPACLVGNNHHQTPFAGEDIQIFERDLPGENTAGLSGQSVSHLPLETCETMNGMWGYKITDQNYKSTKTLIHYLVKAAGKDANLLMNIGPQPDGELPEVAVQRLKEVGEWMSKYGETIYGTRGGLVAPHDWGVTTQKGNKLYVHILNLQDKALFLPIVDKKVKKAVVFADKTPVRFTKNKEGIVLELAKVPTDVDYVVELTID

SEQ ID NO: 13 - DNA, 3927 bp, Artificial Sequence
  SYNTHETIC FUSION PROTEN
atgggcagcagccatcatcatcatcatcacagcagcggcctggtgccgcgcggcagccatatgggatccatggataaacatttgttggtaaaaagaacactagggtgtgtttgtgctgcaacgttgatgggagctgccttagcgacccaccatgattcactcaatactgtaaaagcggaggagaagactgttcaaacaggaaagacagatcagcaggttggtgctaaattggtacaggaaatccgtgaaggaaaacgcggaccactatatgctggttattttaggacatggcatgatcgtgcttcaacaggaatagatggtaaacagcaacatccagaaaatactatggctgaggtcccaaaagaagttgatatcttatttgtttttcatgaccatacagcttcagatagtccattttggtctgaattaaaggacagttatgtccataaattacatcaacagggaacggcacttgttcagatgattggtgttaacgaattaaatggacgtacaggtttatctaaagattatcctgatactcctgaggggaacaaagctttagcagcagccattgtcaaggcatttgtaactgatcgtggtgtcgatggactagatattgatattgagcacgaatttacgaacaaaagaacacctgaagaagatgctcgtgctctaaatgtttttaaagagattgcgcagttaataggtaaaaatggtagtgataaatctaaattgctcatcatggacactaccctaagtgttgaaaataatccaatatttaaagggatagcggaagatcttgattatcttcttagacaatattatggttcacaaggtggagaagctgaagtggatactataaactctgattggaaccaatatcagaattatattgatgctagccagttcatgattggattctccttttttgaagaatctgcgtccaaagggaatttatggtttgatgttaacgaatacgaccctaacaatcctgaaaaagggaaagatattgaaggaacacgtgctaaaaaatatgcagagtggcaacctagtacaggtggtttaaaagcaggtatattctcttatgctattgatcgtgatggagtggctcatgttccttcaacatataaaaataggactagtacaaatttacaacggcatgaagtcgataatatctcacatactgactacaccgtatctcgaaaattaaaaacattgatgaccgaagacaaacgctatgatgtcattgatcaaaaagacattcctgacccagcattaagagaacaaatcattcaacaagttggacagtataaaggcgatttggaacgttataacaagacattggtgcttacaggagataagattcaaaatcttaaaggactagaaaaattaagcaagttacaaaaattagagttgcgccagctatctaacgttaaagaaattactccagaacttttgccggaaagcatgaaaaaagatgctgagcttgttatggtaggcatgactggtttagaaaaactaaaccttagtggtctaaatcgtcaaactttagacggtatagacgtgaatagtattacgcatttgacatcatttgatatttcacataatagtttggacttgtcggaaaagagtgaagaccgtaaactattaatgactttgatggagcaggtttcaaatcatcaaaaaataacggtgaaaaatacggcttttgaaaatcaaaaaccgaaaggttattatcctcagacgtatgataccaaagaaggtcattatgatgttgataatgcagaacatgatattttaactgattttgtttttggaactgttactaaacgtaatacctttattggagacgaagaagcatttgctatctataaagaaggagctgtcgatggtcgacaatatgtgtctaaagactatacttatgaagcttttcgtaaagactataaaggttacaaggttcatttaactgcttctaacctaggagaaacagttacttctaaggtaactgctactactgatgaaacttacttagtagatgtttctgatggggaaaaagttgttcaccacatgaaactcaatataggatctggtgccatcatgatggaaaatctggcaaaaggggctaaagtgattggtacatctggggactttgagcaagcaaagaagattttcgatggtgaaaagtcagatagattcttcacttggggacaaactaactggatagcttttgatctaggagaaattaatcttgcgaaggaatggcgtttatttaatgcagagacaaatactgaaataaagacagatagtagcttaaacgtggctaaaggacgtcttcagattttaaaagatacaactattgatttagaaaaaatggacataaaaaatcgtaaagagtatctgtcgaatgatgaaaattggactgatgttgctcagatggatgatgcaaaagcgatatttaatagtaaattatccaatgttttatctcggtattggcggttttgtgtagatggtggagctagctcttattaccctcaatataccgaacttcaaatcctcggacaacgtttatcaaatgatgtcgctaatacgctgaaggatgaattcatgggcagcagccatcatcaccatcaccatgagctccccgggccgcgggaaaacctgtattttcagggagcgatcgctcagcaaaagtatcaaccgacagaggctaacctgaaagcccggagtgaatttcaggacaataagtttggaatcttccttcattggggactctatgccatgctcgctaccggagagtggacgatgacaaacaataacctgaattataaagagtatgccaaactggccgggggattctatccttcgaagtttgatgcagacaaatgggtagcagccatcaaggcttccggagctaaatatatttgcttcactactcgtcatcacgagggattctcgatgttcgataccaagtactctgattataacattgtaaaagcgactcctttcaaacgtgatgtggtgaaggagctggccgatgcatgtgccaaacatggcatcaaacttcacttctattattcacatatagactggtatcgtgaagatgctcctcagggaagaaccggacgtagaaccggacgtcccaatccgaaaggagattggaagagctattatcagtttatgaataatcagttgacagagctgctgactaattatggtccgatcggcgctatctggtttgacggttggtgggatcaggacatcaatcccgatttcgattgggaacttcccgagcaatatgcacttattcatcgtttgcagccggcttgcctggtaggtaacaaccaccatcagacaccttttgccggagaagatattcaaatcttcgagcgtgatttgccgggagagaatactgcaggactttcgggacaaagcgtcagccatctgcctcttgaaacatgtgagacgatgaatggtatgtggggatacaagattacagatcagaattataaatcgactaaaactttgattcactatctggtgaaagctgccggtaaagatgcaaatctgttgatgaacatcggtccgcaacctgatggtgaacttccggaagtggccgttcagcgcttgaaggaagtgggagagtggatgtcgaaatatggtgaaactatttatggaaccagaggcggtctggttgctccgcatgattggggagtaacgactcaaaaaggcaataaactttatgtacacattcttaatttacaggataaggcactcttcttgcctattgtcgataagaaagtgaaaaaggcggtggtctttgctgacaaaacaccggtacgtttcacaaagaataaggaaggaattgtactggaacttgctaaagttccaacggatgtagactacgtggtagaacttacaattgactaa

SEQ ID NO: 14 - protein, 1308 aa, Artificial Sequence
  SYNTHETIC FUSION PROTEN
MGSSHHHHHHSSGLVPRGSHMGSMDKHLLVKRTLGCVCAATLMGAALATHHDSLNTVKAEEKTVQTGKTDQQVGAKLVQEIREGKRGPLYAGYFRTWHDRASTGIDGKQQHPENTMAEVPKEVDILFVFHDHTASDSPFWSELKDSYVHKLHQQGTALVQMIGVNELNGRTGLSKDYPDTPEGNKALAAAIVKAFVTDRGVDGLDIDIEHEFTNKRTPEEDARALNVFKEIAQLIGKNGSDKSKLLIMDTTLSVENNPIFKGIAEDLDYLLRQYYGSQGGEAEVDTINSDWNQYQNYIDASQFMIGFSFFEESASKGNLWFDVNEYDPNNPEKGKDIEGTRAKKYAEWQPSTGGLKAGIFSYAIDRDGVAHVPSTYKNRTSTNLQRHEVDNISHTDYTVSRKLKTLMTEDKRYDVIDQKDIPDPALREQIIQQVGQYKGDLERYNKTLVLTGDKIQNLKGLEKLSKLQKLELRQLSNVKEITPELLPESMKKDAELVMVGMTGLEKLNLSGLNRQTLDGIDVNSITHLTSFDISHNSLDLSEKSEDRKLLMTLMEQVSNHQKITVKNTAFENQKPKGYYPQTYDTKEGHYDVDNAEHDILTDFVFGTVTKRNTFIGDEEAFAIYKEGAVDGRQYVSKDYTYEAFRKDYKGYKVHLTASNLGETVTSKVTATTDETYLVDVSDGEKVVHHMKLNIGSGAIMMENLAKGAKVIGTSGDFEQAKKIFDGEKSDRFFTWGQTNWIAFDLGEINLAKEWRLFNAETNTEIKTDSSLNVAKGRLQILKDTTIDLEKMDIKNRKEYLSNDENWTDVAQMDDAKAIFNSKLSNVLSRYWRFCVDGGASSYYPQYTELQILGQRLSNDVANTLKDEFMGSSHHHHHHELPGPRENLYFQGAIAQQKYQPTEANLKARSEFQDNKFGIFLHWGLYAMLATGEWTMTNNNLNYKEYAKLAGGFYPSKFDADKWVAAIKASGAKYICFTTRHHEGFSMFDTKYSDYNIVKATPFKRDVVKELADACAKHGIKLHFYYSHIDWYREDAPQGRTGRRTGRPNPKGDWKSYYQFMNNQLTELLTNYGPIGAIWFDGWWDQDINPDFDWELPEQYALIHRLQPACLVGNNHHQTPFAGEDIQIFERDLPGENTAGLSGQSVSHLPLETCETMNGMWGYKITDQNYKSTKTLIHYLVKAAGKDANLLMNIGPQPDGELPEVAVQRLKEVGEWMSKYGETIYGTRGGLVAPHDWGVTTQKGNKLYVHILNLQDKALFLPIVDKKVKKAVVFADKTPVRFTKNKEGIVLELAKVPTDVDYVVELTID

SEQ ID NO: 15 - DNA, 3927 bp, Artificial Sequence
  SYNTHETIC FUSION PROTEN
atgggcagcagccatcatcatcatcatcacagcagcggcctggtgccgcgcggcagccatatgggatccatggataaacatttgttggtaaaaagaacactagggtgtgtttgtgctgcaacgttgatgggagctgccttagcgacccaccatgattcactcaatactgtaaaagcggaggagaagactgttcaaacaggaaagacagatcagcaggttggtgctaaattggtacaggaaatccgtgaaggaaaacgcggaccactatatgctggttattttaggacatggcatgatcgtgcttcaacaggaatagatggtaaacagcaacatccagaaaatactatggctgaggtcccaaaagaagttgatatcttatttgtttttcatgaccatacagcttcagatagtccattttggtctgaattaaaggacagttatgtccataaattacatcaacagggaacggcacttgttcagacaattggtgttaacgaattaaatggacgtacaggtttatctaaagattatcctgatactcctgaggggaacaaagctttagcagcagccattgtcaaggcatttgtaactgatcgtggtgtcgatggactagatattatgattgagcacgaatttacgaacaaaagaacacctgaagaagatgctcgtgctctaaatgtttttaaagagattgcgcagttaataggtaaaaatggtagtgataaatctaaattgctcatcatggacactaccctaagtgttgaaaataatccaatatttaaagggatagcggaagatcttgattatcttcttagacaatattatggttcacaaggtggagaagctgaagtggatactataaactctgattggaaccaatatcagaattatattgatgctagccagttcatgattggattctccttttttgaagaatctgcgtccaaagggaatttatggtttgatgttaacgaatacgaccctaacaatcctgaaaaagggaaagatattgaaggaacacgtgctaaaaaatatgcagagtggcaacctagtacaggtggtttaaaagcaggtatattctcttatgctattgatcgtgatggagtggctcatgttccttcaacatataaaaataggactagtacaaatttacaacggcatgaagtcgataatatctcacatactgactacaccgtatctcgaaaattaaaaacattgatgaccgaagacaaacgctatgatgtcattgatcaaaaagacattcctgacccagcattaagagaacaaatcattcaacaagttggacagtataaaggcgatttggaacgttataacaagacattggtgcttacaggagataagattcaaaatcttaaaggactagaaaaattaagcaagttacaaaaattagagttgcgccagctatctaacgttaaagaaattactccagaacttttgccggaaagcatgaaaaaagatgctgagcttgttatggtaggcatgactggtttagaaaaactaaaccttagtggtctaaatcgtcaaactttagacggtatagacgtgaatagtattacgcatttgacatcatttgatatttcacataatagtttggacttgtcggaaaagagtgaagaccgtaaactattaatgactttgatggagcaggtttcaaatcatcaaaaaataacggtgaaaaatacggcttttgaaaatcaaaaaccgaaaggttattatcctcagacgtatgataccaaagaaggtcattatgatgttgataatgcagaacatgatattttaactgattttgtttttggaactgttactaaacgtaatacctttattggagacgaagaagcatttgctatctataaagaaggagctgtcgatggtcgacaatatgtgtctaaagactatacttatgaagcttttcgtaaagactataaaggttacaaggttcatttaactgcttctaacctaggagaaacagttacttctaaggtaactgctactactgatgaaacttacttagtagatgtttctgatggggaaaaagttgttcaccacatgaaactcaatataggatctggtgccatcatgatggaaaatctggcaaaaggggctaaagtgattggtacatctggggactttgagcaagcaaagaagattttcgatggtgaaaagtcagatagattcttcacttggggacaaactaactggatagcttttgatctaggagaaattaatcttgcgaaggaatggcgtttatttaatgcagagacaaatactgaaataaagacagatagtagcttaaacgtggctaaaggacgtcttcagattttaaaagatacaactattgatttagaaaaaatggacataaaaaatcgtaaagagtatctgtcgaatgatgaaaattggactgatgttgctcagatggatgatgcaaaagcgatatttaatagtaaattatccaatgttttatctcggtattggcggttttgtgtagatggtggagctagctcttattaccctcaatataccgaacttcaaatcctcggacaacgtttatcaaatgatgtcgctaatacgctgaaggatgaattcatgggcagcagccatcatcaccatcaccatgagctccccgggccgcgggaaaacctgtattttcagggagcgatcgctcagcaaaagtatcaaccgacagaggctaacctgaaagcccggagtgaatttcaggacaataagtttggaatcttccttcattggggactctatgccatgctcgctaccggagagtggacgatgacaaacaataacctgaattataaagagtatgccaaactggccgggggattctatccttcgaagtttgatgcagacaaatgggtagcagccatcaaggcttccggagctaaatatatttgcttcactactcgtcatcacgagggattctcgatgttcgataccaagtactctgattataacattgtaaaagcgactcctttcaaacgtgatgtggtgaaggagctggccgatgcatgtgccaaacatggcatcaaacttcacttctattattcacatatagactggtatcgtgaagatgctcctcagggaagaaccggacgtagaaccggacgtcccaatccgaaaggagattggaagagctattatcagtttatgaataatcagttgacagagctgctgactaattatggtccgatcggcgctatctggtttgacggttggtgggatcaggacatcaatcccgatttcgattgggaacttcccgagcaatatgcacttattcatcgtttgcagccggcttgcctggtaggtaacaaccaccatcagacaccttttgccggagaagatattcaaatcttcgagcgtgatttgccgggagagaatactgcaggactttcgggacaaagcgtcagccatctgcctcttgaaacatgtgagacgatgaatggtatgtggggatacaagattacagatcagaattataaatcgactaaaactttgattcactatctggtgaaagctgccggtaaagatgcaaatctgttgatgaacatcggtccgcaacctgatggtgaacttccggaagtggccgttcagcgcttgaaggaagtgggagagtggatgtcgaaatatggtgaaactatttatggaaccagaggcggtctggttgctccgcatgattggggagtaacgactcaaaaaggcaataaactttatgtacacattcttaatttacaggataaggcactcttcttgcctattgtcgataagaaagtgaaaaaggcggtggtctttgctgacaaaacaccggtacgtttcacaaagaataaggaaggaattgtactggaacttgctaaagttccaacggatgtagactacgtggtagaacttacaattgactaa

SEQ ID NO: 16 - protein, 1308 aa, Artificial Sequence
  SYNTHETIC FUSION PROTEN
MGSSHHHHHHSSGLVPRGSHMGSMDKHLLVKRTLGCVCAATLMGAALATHHDSLNTVKAEEKTVQTGKTDQQVGAKLVQEIREGKRGPLYAGYFRTWHDRASTGIDGKQQHPENTMAEVPKEVDILFVFHDHTASDSPFWSELKDSYVHKLHQQGTALVQTIGVNELNGRTGLSKDYPDTPEGNKALAAAIVKAFVTDRGVDGLDIMIEHEFTNKRTPEEDARALNVFKEIAQLIGKNGSDKSKLLIMDTTLSVENNPIFKGIAEDLDYLLRQYYGSQGGEAEVDTINSDWNQYQNYIDASQFMIGFSFFEESASKGNLWFDVNEYDPNNPEKGKDIEGTRAKKYAEWQPSTGGLKAGIFSYAIDRDGVAHVPSTYKNRTSTNLQRHEVDNISHTDYTVSRKLKTLMTEDKRYDVIDQKDIPDPALREQIIQQVGQYKGDLERYNKTLVLTGDKIQNLKGLEKLSKLQKLELRQLSNVKEITPELLPESMKKDAELVMVGMTGLEKLNLSGLNRQTLDGIDVNSITHLTSFDISHNSLDLSEKSEDRKLLMTLMEQVSNHQKITVKNTAFENQKPKGYYPQTYDTKEGHYDVDNAEHDILTDFVFGTVTKRNTFIGDEEAFAIYKEGAVDGRQYVSKDYTYEAFRKDYKGYKVHLTASNLGETVTSKVTATTDETYLVDVSDGEKVVHHMKLNIGSGAIMMENLAKGAKVIGTSGDFEQAKKIFDGEKSDRFFTWGQTNWIAFDLGEINLAKEWRLFNAETNTEIKTDSSLNVAKGRLQILKDTTIDLEKMDIKNRKEYLSNDENWTDVAQMDDAKAIFNSKLSNVLSRYWRFCVDGGASSYYPQYTELQILGQRLSNDVANTLKDEFMGSSHHHHHHELPGPRENLYFQGAIAQQKYQPTEANLKARSEFQDNKFGIFLHWGLYAMLATGEWTMTNNNLNYKEYAKLAGGFYPSKFDADKWVAAIKASGAKYICFTTRHHEGFSMFDTKYSDYNIVKATPFKRDVVKELADACAKHGIKLHFYYSHIDWYREDAPQGRTGRRTGRPNPKGDWKSYYQFMNNQLTELLTNYGPIGAIWFDGWWDQDINPDFDWELPEQYALIHRLQPACLVGNNHHQTPFAGEDIQIFERDLPGENTAGLSGQSVSHLPLETCETMNGMWGYKITDQNYKSTKTLIHYLVKAAGKDANLLMNIGPQPDGELPEVAVQRLKEVGEWMSKYGETIYGTRGGLVAPHDWGVTTQKGNKLYVHILNLQDKALFLPIVDKKVKKAVVFADKTPVRFTKNKEGIVLELAKVPTDVDYVVELTID

SEQ ID NO: 17 - DNA, 2964 bp, Artificial Sequence
  SYNTHETIC FUSION PROTEN
atgggcagcagccatcatcatcatcatcacagcagcggcctggtgccgcgcggcagccatatgcagcaaaagtatcaaccgacagaggctaacctgaaagcccggagtgaatttcaggacaataagtttggaatcttccttcattggggactctatgccatgctcgctaccggagagtggacgatgacaaacaataacctgaattataaagagtatgccaaactggccgggggattctatccttcgaagtttgatgcagacaaatgggtagcagccatcaaggcttccggagctaaatatatttgcttcactactcgtcatcacgagggattctcgatgttcgataccaagtactctgattataacattgtaaaagcgactcctttcaaacgtgatgtggtgaaggagctggccgatgcatgtgccaaacatggcatcaaacttcacttctattattcacatatagactggtatcgtgaagatgctcctcagggaagaaccggacgtagaaccggacgtcccaatccgaaaggagattggaagagctattatcagtttatgaataatcagttgacagagctgctgactaattatggtccgatcggcgctatctggtttgacggttggtgggatcaggacatcaatcccgatttcgattgggaacttcccgagcaatatgcacttattcatcgtttgcagccggcttgcctggtaggtaacaaccaccatcagacaccttttgccggagaagatattcaaatcttcgagcgtgatttgccgggagagaatactgcaggactttcgggacaaagcgtcagccatctgcctcttgaaacatgtgagacgatgaatggtatgtggggatacaagattacagatcagaattataaatcgactaaaactttgattcactatctggtgaaagctgccggtaaagatgcaaatctgttgatgaacatcggtccgcaacctgatggtgaacttccggaagtggccgttcagcgcttgaaggaagtgggagagtggatgtcgaaatatggtgaaactatttatggaaccagaggcggtctggttgctccgcatgattggggagtaacgactcaaaaaggcaataaactttatgtacacattcttaatttacaggataaggcactcttcttgcctattgtcgataagaaagtgaaaaaggcggtggtctttgctgacaaaacaccggtacgtttcacaaagaataaggaaggaattgtactggaacttgctaaagttccaacggatgtagactacgtggtagaacttacaattgacggatccaaagataagtcgtatgatctgattgatgagaaagatttcccagataaggctttgcgagaagctgtgatggcgcaggttggaaccagaaaaggtgatttggaacgtttcaatggcacattacgattggataatccagcgattcaaagtttagaaggtctaaataaatttaaaaaattagctcaattagacttgattggcttatctcgcattacaaagctcgaccgttctgttttacccgctaatatgaagccaggcaaagataccttggaaacagttcttgaaacctataaaaaggataacaaagaagaacctgctactatcccaccagtatctttgaaggtttctggtttaactggtctgaaagaattagatttgtcaggttttgaccgtgaaaccttggctggtcttgatgccgctactctaacgtctttagaaaaagttgatatttctggcaacaaacttgatttggctccaggaacagaaaatcgacaaatttttgatactatgctatcaactatcagcaatcatgttggaagcaatgaacaaacagtgaaatttgacaagcaaaaaccaactgggcattacccagatacctatgggaaaactagtctgcgcttaccagtggcaaatgaaaaagttgatttgcaaagccagcttttgtttgggactgtgacaaatcaaggaaccctaatcaatagcgaagcagactataaggcttaccaaaatcataaaattgctggacgtagctttgttgattcaaactatcattacaataactttaaagtttcttatgagaactataccgttaaagtaactgattccacattgggaaccactactgacaaaacgctagcaactgataaagaagagacctataaggttgacttctttagcccagcagataagacaaaagctgttcatactgctaaagtgattgttggtgacgaaaaaaccatgatggttaatttggcagaaggcgcaacagttattggaggaagtgctgatcctgtaaatgcaagaaaggtatttgatgggcaactgggcagtgagactgataatatctctttaggatgggattctaagcaaagtattatatttaaattgaaagaagatggattaataaagcattggcgtttcttcaatgattcagcccgaaatcctgagacaaccaataaacctattcaggaagcaagtctacaaatttttaatatcaaagattataatctagataatttgttggaaaatcccaataaatttgatgatgaaaaatattggattactgtagatacttacagtgcacaaggagagagagctactgcattcagtaatacattaaataatattactagtaaatattggcgagttgtctttgatactaaaggagatagatatagttcgccagtagtccctgaactccaaattttaggttatccgttacctaacgccgacactatcatgaaaacagtaactactgctaaagagttatctcaacaaaaagataagttttctcaaaagatgcttgatgagttaaaaataaaagagatggctttagaaacttctttgaacagtaagatttttgatgtaactgctattaatgctaatgctggagttttgaaagattgtattgagaaaaggcagctgctaaaaaaataa

SEQ ID NO: 18 - protein, 987 aa, Artificial Sequence
  SYNTHETIC FUSION PROTEN
MGSSHHHHHHSSGLVPRGSHMQQKYQPTEANLKARSEFQDNKFGIFLHWGLYAMLATGEWTMTNNNLNYKEYAKLAGGFYPSKFDADKWVAAIKASGAKYICFTTRHHEGFSMFDTKYSDYNIVKATPFKRDVVKELADACAKHGIKLHFYYSHIDWYREDAPQGRTGRRTGRPNPKGDWKSYYQFMNNQLTELLTNYGPIGAIWFDGWWDQDINPDFDWELPEQYALIHRLQPACLVGNNHHQTPFAGEDIQIFERDLPGENTAGLSGQSVSHLPLETCETMNGMWGYKITDQNYKSTKTLIHYLVKAAGKDANLLMNIGPQPDGELPEVAVQRLKEVGEWMSKYGETIYGTRGGLVAPHDWGVTTQKGNKLYVHILNLQDKALFLPIVDKKVKKAVVFADKTPVRFTKNKEGIVLELAKVPTDVDYVVELTIDGSKDKSYDLIDEKDFPDKALREAVMAQVGTRKGDLERFNGTLRLDNPAIQSLEGLNKFKKLAQLDLIGLSRITKLDRSVLPANMKPGKDTLETVLETYKKDNKEEPATIPPVSLKVSGLTGLKELDLSGFDRETLAGLDAATLTSLEKVDISGNKLDLAPGTENRQIFDTMLSTISNHVGSNEQTVKFDKQKPTGHYPDTYGKTSLRLPVANEKVDLQSQLLFGTVTNQGTLINSEADYKAYQNHKIAGRSFVDSNYHYNNFKVSYENYTVKVTDSTLGTTTDKTLATDKEETYKVDFFSPADKTKAVHTAKVIVGDEKTMMVNLAEGATVIGGSADPVNARKVFDGQLGSETDNISLGWDSKQSIIFKLKEDGLIKHWRFFNDSARNPETTNKPIQEASLQIFNIKDYNLDNLLENPNKFDDEKYWITVDTYSAQGERATAFSNTLNNITSKYWRVVFDTKGDRYSSPVVPELQILGYPLPNADTIMKTVTTAKELSQQKDKFSQKMLDELKIKEMALETSLNSKIFDVTAINANAGVLKDCIEKRQLLKK

SEQ ID NO: 19 - DNA, 2979 bp, Artificial Sequence
  SYNTHETIC FUSION PROTEN
atgggcagcagccatcatcaccatcaccatgagctccccgggccgcgggaaaacctgtattttcagggagcgatcgctcagcaaaagtatcaaccgacagaggctaacctgaaagcccggagtgaatttcaggacaataagtttggaatcttccttcattggggactctatgccatgctcgctaccggagagtggacgatgacaaacaataacctgaattataaagagtatgccaaactggccgggggattctatccttcgaagtttgatgcagacaaatgggtagcagccatcaaggcttccggagctaaatatatttgcttcactactcgtcatcacgagggattctcgatgttcgataccaagtactctgattataacattgtaaaagcgactcctttcaaacgtgatgtggtgaaggagctggccgatgcatgtgccaaacatggcatcaaacttcacttctattattcacatatagactggtatcgtgaagatgctcctcagggaagaaccggacgtagaaccggacgtcccaatccgaaaggagattggaagagctattatcagtttatgaataatcagttgacagagctgctgactaattatggtccgatcggcgctatctggtttgacggttggtgggatcaggacatcaatcccgatttcgattgggaacttcccgagcaatatgcacttattcatcgtttgcagccggcttgcctggtaggtaacaaccaccatcagacaccttttgccggagaagatattcaaatcttcgagcgtgatttgccgggagagaatactgcaggactttcgggacaaagcgtcagccatctgcctcttgaaacatgtgagacgatgaatggtatgtggggatacaagattacagatcagaattataaatcgactaaaactttgattcactatctggtgaaagctgccggtaaagatgcaaatctgttgatgaacatcggtccgcaacctgatggtgaacttccggaagtggccgttcagcgcttgaaggaagtgggagagtggatgtcgaaatatggtgaaactatttatggaaccagaggcggtctggttgctccgcatgattggggagtaacgactcaaaaaggcaataaactttatgtacacattcttaatttacaggataaggcactcttcttgcctattgtcgataagaaagtgaaaaaggcggtggtctttgctgacaaaacaccggtacgtttcacaaagaataaggaaggaattgtactggaacttgctaaagttccaacggatgtagactacgtggtagaacttacaattgacggatccaaagataagtcgtatgatctgattgatgagaaagatttcccagataaggctttgcgagaagctgtgatggcgcaggttggaaccagaaaaggtgatttggaacgtttcaatggcacattacgattggataatccagcgattcaaagtttagaaggtctaaataaatttaaaaaattagctcaattagacttgattggcttatctcgcattacaaagctcgaccgttctgttttacccgctaatatgaagccaggcaaagataccttggaaacagttcttgaaacctataaaaaggataacaaagaagaacctgctactatcccaccagtatctttgaaggtttctggtttaactggtctgaaagaattagatttgtcaggttttgaccgtgaaaccttggctggtcttgatgccgctactctaacgtctttagaaaaagttgatatttctggcaacaaacttgatttggctccaggaacagaaaatcgacaaatttttgatactatgctatcaactatcagcaatcatgttggaagcaatgaacaaacagtgaaatttgacaagcaaaaaccaactgggcattacccagatacctatgggaaaactagtctgcgcttaccagtggcaaatgaaaaagttgatttgcaaagccagcttttgtttgggactgtgacaaatcaaggaaccctaatcaatagcgaagcagactataaggcttaccaaaatcataaaattgctggacgtagctttgttgattcaaactatcattacaataactttaaagtttcttatgagaactataccgttaaagtaactgattccacattgggaaccactactgacaaaacgctagcaactgataaagaagagacctataaggttgacttctttagcccagcagataagacaaaagctgttcatactgctaaagtgattgttggtgacgaaaaaaccatgatggttaatttggcagaaggcgcaacagttattggaggaagtgctgatcctgtaaatgcaagaaaggtatttgatgggcaactgggcagtgagactgataatatctctttaggatgggattctaagcaaagtattatatttaaattgaaagaagatggattaataaagcattggcgtttcttcaatgattcagcccgaaatcctgagacaaccaataaacctattcaggaagcaagtctacaaatttttaatatcaaagattataatctagataatttgttggaaaatcccaataaatttgatgatgaaaaatattggattactgtagatacttacagtgcacaaggagagagagctactgcattcagtaatacattaaataatattactagtaaatattggcgagttgtctttgatactaaaggagatagatatagttcgccagtagtccctgaactccaaattttaggttatccgttacctaacgccgacactatcatgaaaacagtaactactgctaaagagttatctcaacaaaaagataagttttctcaaaagatgcttgatgagttaaaaataaaagagatggctttagaaacttctttgaacagtaagatttttgatgtaactgctattaatgctaatgctggagttttgaaagattgtattgagaaaaggcagctgctaaaaaaataa

SEQ ID NO: 20 - protein, 992 aa, Artificial Sequence
  SYNTHETIC FUSION PROTEN
MGSSHHHHHHELPGPRENLYFQGAIAQQKYQPTEANLKARSEFQDNKFGIFLHWGLYAMLATGEWTMTNNNLNYKEYAKLAGGFYPSKFDADKWVAAIKASGAKYICFTTRHHEGFSMFDTKYSDYNIVKATPFKRDVVKELADACAKHGIKLHFYYSHIDWYREDAPQGRTGRRTGRPNPKGDWKSYYQFMNNQLTELLTNYGPIGAIWFDGWWDQDINPDFDWELPEQYALIHRLQPACLVGNNHHQTPFAGEDIQIFERDLPGENTAGLSGQSVSHLPLETCETMNGMWGYKITDQNYKSTKTLIHYLVKAAGKDANLLMNIGPQPDGELPEVAVQRLKEVGEWMSKYGETIYGTRGGLVAPHDWGVTTQKGNKLYVHILNLQDKALFLPIVDKKVKKAVVFADKTPVRFTKNKEGIVLELAKVPTDVDYVVELTIDGSKDKSYDLIDEKDFPDKALREAVMAQVGTRKGDLERFNGTLRLDNPAIQSLEGLNKFKKLAQLDLIGLSRITKLDRSVLPANMKPGKDTLETVLETYKKDNKEEPATIPPVSLKVSGLTGLKELDLSGFDRETLAGLDAATLTSLEKVDISGNKLDLAPGTENRQIFDTMLSTISNHVGSNEQTVKFDKQKPTGHYPDTYGKTSLRLPVANEKVDLQSQLLFGTVTNQGTLINSEADYKAYQNHKIAGRSFVDSNYHYNNFKVSYENYTVKVTDSTLGTTTDKTLATDKEETYKVDFFSPADKTKAVHTAKVIVGDEKTMMVNLAEGATVIGGSADPVNARKVFDGQLGSETDNISLGWDSKQSIIFKLKEDGLIKHWRFFNDSARNPETTNKPIQEASLQIFNIKDYNLDNLLENPNKFDDEKYWITVDTYSAQGERATAFSNTLNNITSKYWRVVFDTKGDRYSSPVVPELQILGYPLPNADTIMKTVTTAKELSQQKDKFSQKMLDELKIKEMALETSLNSKIFDVTAINANAGVLKDCIEKRQLLKK

SEQ ID NO: 21 - DNA, 4224 bp, Artificial Sequence
  SYNTHETIC FUSION PROTEN
atgggcagcagccatcatcatcatcatcacagcagcggcctggtgccgcgcggcagccatatgcagcaaaagtatcaaccgacagaggctaacctgaaagcccggagtgaatttcaggacaataagtttggaatcttccttcattggggactctatgccatgctcgctaccggagagtggacgatgacaaacaataacctgaattataaagagtatgccaaactggccgggggattctatccttcgaagtttgatgcagacaaatgggtagcagccatcaaggcttccggagctaaatatatttgcttcactactcgtcatcacgagggattctcgatgttcgataccaagtactctgattataacattgtaaaagcgactcctttcaaacgtgatgtggtgaaggagctggccgatgcatgtgccaaacatggcatcaaacttcacttctattattcacatatagactggtatcgtgaagatgctcctcagggaagaaccggacgtagaaccggacgtcccaatccgaaaggagattggaagagctattatcagtttatgaataatcagttgacagagctgctgactaattatggtccgatcggcgctatctggtttgacggttggtgggatcaggacatcaatcccgatttcgattgggaacttcccgagcaatatgcacttattcatcgtttgcagccggcttgcctggtaggtaacaaccaccatcagacaccttttgccggagaagatattcaaatcttcgagcgtgatttgccgggagagaatactgcaggactttcgggacaaagcgtcagccatctgcctcttgaaacatgtgagacgatgaatggtatgtggggatacaagattacagatcagaattataaatcgactaaaactttgattcactatctggtgaaagctgccggtaaagatgcaaatctgttgatgaacatcggtccgcaacctgatggtgaacttccggaagtggccgttcagcgcttgaaggaagtgggagagtggatgtcgaaatatggtgaaactatttatggaaccagaggcggtctggttgctccgcatgattggggagtaacgactcaaaaaggcaataaactttatgtacacattcttaatttacaggataaggcactcttcttgcctattgtcgataagaaagtgaaaaaggcggtggtctttgctgacaaaacaccggtacgtttcacaaagaataaggaaggaattgtactggaacttgctaaagttccaacggatgtagactacgtggtagaacttacaattgacggatccacccaccatgattcactcaatactgtaaaagcggaggagaagactgttcaggttcagaaaggattaccttctatcgatagcttgcattatctgtcagagaatagcaaaaaagaatttaaagaagaactctcaaaagcggggcaagaatctcaaaaggtcaaagagatattagcaaaagctcagcaggcagataaacaagctcaagaacttgccaaaatgaaaattcctgagaaaataccgatgaaaccgttacatggttctctctacggtggttactttagaacttggcatgacaaaacatcagatccaacagaaaaagacaaagttaactcgatgggagagcttcctaaagaagtagatctagcctttattttccacgattggacaaaagattatagccttttttggaaagaattggccaccaaacatgtgccaaagttaaacaagcaagggacacgtgtcattcgtaccattccatggcgtttcctagctgggggtgataacagtggtattgcagaagataccagtaaatacccaaatacaccagagggaaataaagctttagccaaagctattgttgatgaatatgtttataaatacaaccttgatggcttagatgtggatgttgaacatgatagtattccaaaagttgacaaaaaagaagatacagcaggcgtagaacgctctattcaagtgtttgaagaaattgggaaattaattggaccaaaaggtgttgataaatcgcggttatttattatggatagcacctacatggctgataaaaacccattgattgagcgaggagctccttatattaatttattactggtacaggtctatggttcacaaggagagaaaggtggttgggagcctgtttctaatcgacctgaaaaaacaatggaagaacgatggcaaggttatagcaagtatattcgtcctgaacaatacatgattggtttttctttctatgaggaaaatgctcaagaagggaatctttggtatgatattaattctcgcaaggacgaggacaaagcaaatggaattaacactgacataactggaacgcgtgccgaacggtatgcaaggtggcaacctaagacaggtggggttaagggaggtatcttctcctacgctattgaccgagatggtgtagctcatcaacctaaaaaatatgctaaacagaaagagtttaaggacgcaactgataacatcttccactcagattatagtgtctccaaggcattaaagacagttatgctaaaagataagtcgtatgatctgattgatgagaaagatttcccagataaggctttgcgagaagctgtgatggcgcaggttggaaccagaaaaggtgatttggaacgtttcaatggcacattacgattggataatccagcgattcaaagtttagaaggtctaaataaatttaaaaaattagctcaattagacttgattggcttatctcgcattacaaagctcgaccgttctgttttacccgctaatatgaagccaggcaaagataccttggaaacagttcttgaaacctataaaaaggataacaaagaagaacctgctactatcccaccagtatctttgaaggtttctggtttaactggtctgaaagaattagatttgtcaggttttgaccgtgaaaccttggctggtcttgatgccgctactctaacgtctttagaaaaagttgatatttctggcaacaaacttgatttggctccaggaacagaaaatcgacaaatttttgatactatgctatcaactatcagcaatcatgttggaagcaatgaacaaacagtgaaatttgacaagcaaaaaccaactgggcattacccagatacctatgggaaaactagtctgcgcttaccagtggcaaatgaaaaagttgatttgcaaagccagcttttgtttgggactgtgacaaatcaaggaaccctaatcaatagcgaagcagactataaggcttaccaaaatcataaaattgctggacgtagctttgttgattcaaactatcattacaataactttaaagtttcttatgagaactataccgttaaagtaactgattccacattgggaaccactactgacaaaacgctagcaactgataaagaagagacctataaggttgacttctttagcccagcagataagacaaaagctgttcatactgctaaagtgattgttggtgacgaaaaaaccatgatggttaatttggcagaaggcgcaacagttattggaggaagtgctgatcctgtaaatgcaagaaaggtatttgatgggcaactgggcagtgagactgataatatctctttaggatgggattctaagcaaagtattatatttaaattgaaagaagatggattaataaagcattggcgtttcttcaatgattcagcccgaaatcctgagacaaccaataaacctattcaggaagcaagtctacaaatttttaatatcaaagattataatctagataatttgttggaaaatcccaataaatttgatgatgaaaaatattggattactgtagatacttacagtgcacaaggagagagagctactgcattcagtaatacattaaataatattactagtaaatattggcgagttgtctttgatactaaaggagatagatatagttcgccagtagtccctgaactccaaattttaggttatccgttacctaacgccgacactatcatgaaaacagtaactactgctaaagagttatctcaacaaaaagataagttttctcaaaagatgcttgatgagttaaaaataaaagagatggctttagaaacttctttgaacagtaagatttttgatgtaactgctattaatgctaatgctggagttttgaaagattgtattgagaaaaggcagctgctaaaaaaataa

SEQ ID NO: 22 - protein, 1407 aa, Artificial Sequence
  SYNTHETIC FUSION PROTEN
MGSSHHHHHHSSGLVPRGSHMQQKYQPTEANLKARSEFQDNKFGIFLHWGLYAMLATGEWTMTNNNLNYKEYAKLAGGFYPSKFDADKWVAAIKASGAKYICFTTRHHEGFSMFDTKYSDYNIVKATPFKRDVVKELADACAKHGIKLHFYYSHIDWYREDAPQGRTGRRTGRPNPKGDWKSYYQFMNNQLTELLTNYGPIGAIWFDGWWDQDINPDFDWELPEQYALIHRLQPACLVGNNHHQTPFAGEDIQIFERDLPGENTAGLSGQSVSHLPLETCETMNGMWGYKITDQNYKSTKTLIHYLVKAAGKDANLLMNIGPQPDGELPEVAVQRLKEVGEWMSKYGETIYGTRGGLVAPHDWGVTTQKGNKLYVHILNLQDKALFLPIVDKKVKKAVVFADKTPVRFTKNKEGIVLELAKVPTDVDYVVELTIDGSTHHDSLNTVKAEEKTVQVQKGLPSIDSLHYLSENSKKEFKEELSKAGQESQKVKEILAKAQQADKQAQELAKMKIPEKIPMKPLHGSLYGGYFRTWHDKTSDPTEKDKVNSMGELPKEVDLAFIFHDWTKDYSLFWKELATKHVPKLNKQGTRVIRTIPWRFLAGGDNSGIAEDTSKYPNTPEGNKALAKAIVDEYVYKYNLDGLDVDVEHDSIPKVDKKEDTAGVERSIQVFEEIGKLIGPKGVDKSRLFIMDSTYMADKNPLIERGAPYINLLLVQVYGSQGEKGGWEPVSNRPEKTMEERWQGYSKYIRPEQYMIGFSFYEENAQEGNLWYDINSRKDEDKANGINTDITGTRAERYARWQPKTGGVKGGIFSYAIDRDGVAHQPKKYAKQKEFKDATDNIFHSDYSVSKALKTVMLKDKSYDLIDEKDFPDKALREAVMAQVGTRKGDLERFNGTLRLDNPAIQSLEGLNKFKKLAQLDLIGLSRITKLDRSVLPANMKPGKDTLETVLETYKKDNKEEPATIPPVSLKVSGLTGLKELDLSGFDRETLAGLDAATLTSLEKVDISGNKLDLAPGTENRQIFDTMLSTISNHVGSNEQTVKFDKQKPTGHYPDTYGKTSLRLPVANEKVDLQSQLLFGTVTNQGTLINSEADYKAYQNHKIAGRSFVDSNYHYNNFKVSYENYTVKVTDSTLGTTTDKTLATDKEETYKVDFFSPADKTKAVHTAKVIVGDEKTMMVNLAEGATVIGGSADPVNARKVFDGQLGSETDNISLGWDSKQSIIFKLKEDGLIKHWRFFNDSARNPETTNKPIQEASLQIFNIKDYNLDNLLENPNKFDDEKYWITVDTYSAQGERATAFSNTLNNITSKYWRVVFDTKGDRYSSPVVPELQILGYPLPNADTIMKTVTTAKELSQQKDKFSQKMLDELKIKEMALETSLNSKIFDVTAINANAGVLKDCIEKRQLLKK

SEQ ID NO: 23 - DNA, 4224 bp, Artificial Sequence
  SYNTHETIC FUSION PROTEN
atgggcagcagccatcatcatcatcatcacagcagcggcctggtgccgcgcggcagccatatgcagcaaaagtatcaaccgacagaggctaacctgaaagcccggagtgaatttcaggacaataagtttggaatcttccttcattggggactctatgccatgctcgctaccggagagtggacgatgacaaacaataacctgaattataaagagtatgccaaactggccgggggattctatccttcgaagtttgatgcagacaaatgggtagcagccatcaaggcttccggagctaaatatatttgcttcactactcgtcatcacgagggattctcgatgttcgataccaagtactctgattataacattgtaaaagcgactcctttcaaacgtgatgtggtgaaggagctggccgatgcatgtgccaaacatggcatcaaacttcacttctattattcacatatagactggtatcgtgaagatgctcctcagggaagaaccggacgtagaaccggacgtcccaatccgaaaggagattggaagagctattatcagtttatgaataatcagttgacagagctgctgactaattatggtccgatcggcgctatctggtttgacggttggtgggatcaggacatcaatcccgatttcgattgggaacttcccgagcaatatgcacttattcatcgtttgcagccggcttgcctggtaggtaacaaccaccatcagacaccttttgccggagaagatattcaaatcttcgagcgtgatttgccgggagagaatactgcaggactttcgggacaaagcgtcagccatctgcctcttgaaacatgtgagacgatgaatggtatgtggggatacaagattacagatcagaattataaatcgactaaaactttgattcactatctggtgaaagctgccggtaaagatgcaaatctgttgatgaacatcggtccgcaacctgatggtgaacttccggaagtggccgttcagcgcttgaaggaagtgggagagtggatgtcgaaatatggtgaaactatttatggaaccagaggcggtctggttgctccgcatgattggggagtaacgactcaaaaaggcaataaactttatgtacacattcttaatttacaggataaggcactcttcttgcctattgtcgataagaaagtgaaaaaggcggtggtctttgctgacaaaacaccggtacgtttcacaaagaataaggaaggaattgtactggaacttgctaaagttccaacggatgtagactacgtggtagaacttacaattgacggatccacccaccatgattcactcaatactgtaaaagcggaggagaagactgttcaggttcagaaaggattaccttctatcgatagcttgcattatctgtcagagaatagcaaaaaagaatttaaagaagaactctcaaaagcggggcaagaatctcaaaaggtcaaagagatattagcaaaagctcagcaggcagataaacaagctcaagaacttgccaaaatgaaaattcctgagaaaataccgatgaaaccgttacatggttctctctacggtggttactttagaacttggcatgacaaaacatcagatccaacagaaaaagacaaagttaactcgatgggagagcttcctaaagaagtagatctagcctttattttccacgattggacaaaagattatagccttttttggaaagaattggccaccaaacatgtgccaaagttaaacaagcaagggacacgtgtcattcgtaccattccatggcgtttcctagctgggggtgataacagtggtattgcagaagataccagtaaatacccaaatacaccagagggaaataaagctttagccaaagctattgttgatgaatatgtttataaatacaaccttgatggcttagatgtgcaggttgaacatgatagtattccaaaagttgacaaaaaagaagatacagcaggcgtagaacgctctattcaagtgtttgaagaaattgggaaattaattggaccaaaaggtgttgataaatcgcggttatttattatggatagcacctacatggctgataaaaacccattgattgagcgaggagctccttatattaatttattactggtacaggtctatggttcacaaggagagaaaggtggttgggagcctgtttctaatcgacctgaaaaaacaatggaagaacgatggcaaggttatagcaagtatattcgtcctgaacaatacatgattggtttttctttctatgaggaaaatgctcaagaagggaatctttggtatgatattaattctcgcaaggacgaggacaaagcaaatggaattaacactgacataactggaacgcgtgccgaacggtatgcaaggtggcaacctaagacaggtggggttaagggaggtatcttctcctacgctattgaccgagatggtgtagctcatcaacctaaaaaatatgctaaacagaaagagtttaaggacgcaactgataacatcttccactcagattatagtgtctccaaggcattaaagacagttatgctaaaagataagtcgtatgatctgattgatgagaaagatttcccagataaggctttgcgagaagctgtgatggcgcaggttggaaccagaaaaggtgatttggaacgtttcaatggcacattacgattggataatccagcgattcaaagtttagaaggtctaaataaatttaaaaaattagctcaattagacttgattggcttatctcgcattacaaagctcgaccgttctgttttacccgctaatatgaagccaggcaaagataccttggaaacagttcttgaaacctataaaaaggataacaaagaagaacctgctactatcccaccagtatctttgaaggtttctggtttaactggtctgaaagaattagatttgtcaggttttgaccgtgaaaccttggctggtcttgatgccgctactctaacgtctttagaaaaagttgatatttctggcaacaaacttgatttggctccaggaacagaaaatcgacaaatttttgatactatgctatcaactatcagcaatcatgttggaagcaatgaacaaacagtgaaatttgacaagcaaaaaccaactgggcattacccagatacctatgggaaaactagtctgcgcttaccagtggcaaatgaaaaagttgatttgcaaagccagcttttgtttgggactgtgacaaatcaaggaaccctaatcaatagcgaagcagactataaggcttaccaaaatcataaaattgctggacgtagctttgttgattcaaactatcattacaataactttaaagtttcttatgagaactataccgttaaagtaactgattccacattgggaaccactactgacaaaacgctagcaactgataaagaagagacctataaggttgacttctttagcccagcagataagacaaaagctgttcatactgctaaagtgattgttggtgacgaaaaaaccatgatggttaatttggcagaaggcgcaacagttattggaggaagtgctgatcctgtaaatgcaagaaaggtatttgatgggcaactgggcagtgagactgataatatctctttaggatgggattctaagcaaagtattatatttaaattgaaagaagatggattaataaagcattggcgtttcttcaatgattcagcccgaaatcctgagacaaccaataaacctattcaggaagcaagtctacaaatttttaatatcaaagattataatctagataatttgttggaaaatcccaataaatttgatgatgaaaaatattggattactgtagatacttacagtgcacaaggagagagagctactgcattcagtaatacattaaataatattactagtaaatattggcgagttgtctttgatactaaaggagatagatatagttcgccagtagtccctgaactccaaattttaggttatccgttacctaacgccgacactatcatgaaaacagtaactactgctaaagagttatctcaacaaaaagataagttttctcaaaagatgcttgatgagttaaaaataaaagagatggctttagaaacttctttgaacagtaagatttttgatgtaactgctattaatgctaatgctggagttttgaaagattgtattgagaaaaggcagctgctaaaaaaataa

SEQ ID NO: 24 - protein, 1407 aa, Artificial Sequence
  SYNTHETIC FUSION PROTEN
MGSSHHHHHHSSGLVPRGSHMQQKYQPTEANLKARSEFQDNKFGIFLHWGLYAMLATGEWTMTNNNLNYKEYAKLAGGFYPSKFDADKWVAAIKASGAKYICFTTRHHEGFSMFDTKYSDYNIVKATPFKRDVVKELADACAKHGIKLHFYYSHIDWYREDAPQGRTGRRTGRPNPKGDWKSYYQFMNNQLTELLTNYGPIGAIWFDGWWDQDINPDFDWELPEQYALIHRLQPACLVGNNHHQTPFAGEDIQIFERDLPGENTAGLSGQSVSHLPLETCETMNGMWGYKITDQNYKSTKTLIHYLVKAAGKDANLLMNIGPQPDGELPEVAVQRLKEVGEWMSKYGETIYGTRGGLVAPHDWGVTTQKGNKLYVHILNLQDKALFLPIVDKKVKKAVVFADKTPVRFTKNKEGIVLELAKVPTDVDYVVELTIDGSTHHDSLNTVKAEEKTVQVQKGLPSIDSLHYLSENSKKEFKEELSKAGQESQKVKEILAKAQQADKQAQELAKMKIPEKIPMKPLHGSLYGGYFRTWHDKTSDPTEKDKVNSMGELPKEVDLAFIFHDWTKDYSLFWKELATKHVPKLNKQGTRVIRTIPWRFLAGGDNSGIAEDTSKYPNTPEGNKALAKAIVDEYVYKYNLDGLDVQVEHDSIPKVDKKEDTAGVERSIQVFEEIGKLIGPKGVDKSRLFIMDSTYMADKNPLIERGAPYINLLLVQVYGSQGEKGGWEPVSNRPEKTMEERWQGYSKYIRPEQYMIGFSFYEENAQEGNLWYDINSRKDEDKANGINTDITGTRAERYARWQPKTGGVKGGIFSYAIDRDGVAHQPKKYAKQKEFKDATDNIFHSDYSVSKALKTVMLKDKSYDLIDEKDFPDKALREAVMAQVGTRKGDLERFNGTLRLDNPAIQSLEGLNKFKKLAQLDLIGLSRITKLDRSVLPANMKPGKDTLETVLETYKKDNKEEPATIPPVSLKVSGLTGLKELDLSGFDRETLAGLDAATLTSLEKVDISGNKLDLAPGTENRQIFDTMLSTISNHVGSNEQTVKFDKQKPTGHYPDTYGKTSLRLPVANEKVDLQSQLLFGTVTNQGTLINSEADYKAYQNHKIAGRSFVDSNYHYNNFKVSYENYTVKVTDSTLGTTTDKTLATDKEETYKVDFFSPADKTKAVHTAKVIVGDEKTMMVNLAEGATVIGGSADPVNARKVFDGQLGSETDNISLGWDSKQSIIFKLKEDGLIKHWRFFNDSARNPETTNKPIQEASLQIFNIKDYNLDNLLENPNKFDDEKYWITVDTYSAQGERATAFSNTLNNITSKYWRVVFDTKGDRYSSPVVPELQILGYPLPNADTIMKTVTTAKELSQQKDKFSQKMLDELKIKEMALETSLNSKIFDVTAINANAGVLKDCIEKRQLLKK

SEQ ID NO: 25 - DNA, 3924 bp, Artificial Sequence
  SYNTHETIC FUSION PROTEN
atgggcagcagccatcatcatcatcatcacagcagcggcctggtgccgcgcggcagccatatgggcagcagccatcatcaccatcaccatgagctccccgggccgcgggaaaacctgtattttcagggagcgatcgctcagcaaaagtatcaaccgacagaggctaacctgaaagcccggagtgaatttcaggacaataagtttggaatcttccttcattggggactctatgccatgctcgctaccggagagtggacgatgacaaacaataacctgaattataaagagtatgccaaactggccgggggattctatccttcgaagtttgatgcagacaaatgggtagcagccatcaaggcttccggagctaaatatatttgcttcactactcgtcatcacgagggattctcgatgttcgataccaagtactctgattataacattgtaaaagcgactcctttcaaacgtgatgtggtgaaggagctggccgatgcatgtgccaaacatggcatcaaacttcacttctattattcacatatagactggtatcgtgaagatgctcctcagggaagaaccggacgtagaaccggacgtcccaatccgaaaggagattggaagagctattatcagtttatgaataatcagttgacagagctgctgactaattatggtccgatcggcgctatctggtttgacggttggtgggatcaggacatcaatcccgatttcgattgggaacttcccgagcaatatgcacttattcatcgtttgcagccggcttgcctggtaggtaacaaccaccatcagacaccttttgccggagaagatattcaaatcttcgagcgtgatttgccgggagagaatactgcaggactttcgggacaaagcgtcagccatctgcctcttgaaacatgtgagacgatgaatggtatgtggggatacaagattacagatcagaattataaatcgactaaaactttgattcactatctggtgaaagctgccggtaaagatgcaaatctgttgatgaacatcggtccgcaacctgatggtgaacttccggaagtggccgttcagcgcttgaaggaagtgggagagtggatgtcgaaatatggtgaaactatttatggaaccagaggcggtctggttgctccgcatgattggggagtaacgactcaaaaaggcaataaactttatgtacacattcttaatttacaggataaggcactcttcttgcctattgtcgataagaaagtgaaaaaggcggtggtctttgctgacaaaacaccggtacgtttcacaaagaataaggaaggaattgtactggaacttgctaaagttccaacggatgtagactacgtggtagaacttacaattgacggatccatggataaacatttgttggtaaaaagaacactagggtgtgtttgtgctgcaacgttgatgggagctgccttagcgacccaccatgattcactcaatactgtaaaagcggaggagaagactgttcaaacaggaaagacagatcagcaggttggtgctaaattggtacaggaaatccgtgaaggaaaacgcggaccactatatgctggttattttaggacatggcatgatcgtgcttcaacaggaatagatggtaaacagcaacatccagaaaatactatggctgaggtcccaaaagaagttgatatcttatttgtttttcatgaccatacagcttcagatagtccattttggtctgaattaaaggacagttatgtccataaattacatcaacagggaacggcacttgttcagacaattggtgttaacgaattaaatggacgtacaggtttatctaaagattatcctgatactcctgaggggaacaaagctttagcagcagccattgtcaaggcatttgtaactgatcgtggtgtcgatggactagatattgatattgagcacgaatttacgaacaaaagaacacctgaagaagatgctcgtgctctaaatgtttttaaagagattgcgcagttaataggtaaaaatggtagtgataaatctaaattgctcatcatggacactaccctaagtgttgaaaataatccaatatttaaagggatagcggaagatcttgattatcttcttagacaatattatggttcacaaggtggagaagctgaagtggatactataaactctgattggaaccaatatcagaattatattgatgctagccagttcatgattggattctccttttttgaagaatctgcgtccaaagggaatttatggtttgatgttaacgaatacgaccctaacaatcctgaaaaagggaaagatattgaaggaacacgtgctaaaaaatatgcagagtggcaacctagtacaggtggtttaaaagcaggtatattctcttatgctattgatcgtgatggagtggctcatgttccttcaacatataaaaataggactagtacaaatttacaacggcatgaagtcgataatatctcacatactgactacaccgtatctcgaaaattaaaaacattgatgaccgaagacaaacgctatgatgtcattgatcaaaaagacattcctgacccagcattaagagaacaaatcattcaacaagttggacagtataaaggcgatttggaacgttataacaagacattggtgcttacaggagataagattcaaaatcttaaaggactagaaaaattaagcaagttacaaaaattagagttgcgccagctatctaacgttaaagaaattactccagaacttttgccggaaagcatgaaaaaagatgctgagcttgttatggtaggcatgactggtttagaaaaactaaaccttagtggtctaaatcgtcaaactttagacggtatagacgtgaatagtattacgcatttgacatcatttgatatttcacataatagtttggacttgtcggaaaagagtgaagaccgtaaactattaatgactttgatggagcaggtttcaaatcatcaaaaaataacggtgaaaaatacggcttttgaaaatcaaaaaccgaaaggttattatcctcagacgtatgataccaaagaaggtcattatgatgttgataatgcagaacatgatattttaactgattttgtttttggaactgttactaaacgtaatacctttattggagacgaagaagcatttgctatctataaagaaggagctgtcgatggtcgacaatatgtgtctaaagactatacttatgaagcttttcgtaaagactataaaggttacaaggttcatttaactgcttctaacctaggagaaacagttacttctaaggtaactgctactactgatgaaacttacttagtagatgtttctgatggggaaaaagttgttcaccacatgaaactcaatataggatctggtgccatcatgatggaaaatctggcaaaaggggctaaagtgattggtacatctggggactttgagcaagcaaagaagattttcgatggtgaaaagtcagatagattcttcacttggggacaaactaactggatagcttttgatctaggagaaattaatcttgcgaaggaatggcgtttatttaatgcagagacaaatactgaaataaagacagatagtagcttaaacgtggctaaaggacgtcttcagattttaaaagatacaactattgatttagaaaaaatggacataaaaaatcgtaaagagtatctgtcgaatgatgaaaattggactgatgttgctcagatggatgatgcaaaagcgatatttaatagtaaattatccaatgttttatctcggtattggcggttttgtgtagatggtggagctagctcttattaccctcaatataccgaacttcaaatcctcggacaacgtttatcaaatgatgtcgctaatacgctgaaggatgaattctaa

SEQ ID NO: 26 - protein, 1307 aa, Artificial Sequence
  SYNTHETIC FUSION PROTEN
MGSSHHHHHHSSGLVPRGSHMGSSHHHHHHELPGPRENLYFQGAIAQQKYQPTEANLKARSEFQDNKFGIFLHWGLYAMLATGEWTMTNNNLNYKEYAKLAGGFYPSKFDADKWVAAIKASGAKYICFTTRHHEGFSMFDTKYSDYNIVKATPFKRDVVKELADACAKHGIKLHFYYSHIDWYREDAPQGRTGRRTGRPNPKGDWKSYYQFMNNQLTELLTNYGPIGAIWFDGWWDQDINPDFDWELPEQYALIHRLQPACLVGNNHHQTPFAGEDIQIFERDLPGENTAGLSGQSVSHLPLETCETMNGMWGYKITDQNYKSTKTLIHYLVKAAGKDANLLMNIGPQPDGELPEVAVQRLKEVGEWMSKYGETIYGTRGGLVAPHDWGVTTQKGNKLYVHILNLQDKALFLPIVDKKVKKAVVFADKTPVRFTKNKEGIVLELAKVPTDVDYVVELTIDGSMDKHLLVKRTLGCVCAATLMGAALATHHDSLNTVKAEEKTVQTGKTDQQVGAKLVQEIREGKRGPLYAGYFRTWHDRASTGIDGKQQHPENTMAEVPKEVDILFVFHDHTASDSPFWSELKDSYVHKLHQQGTALVQTIGVNELNGRTGLSKDYPDTPEGNKALAAAIVKAFVTDRGVDGLDIDIEHEFTNKRTPEEDARALNVFKEIAQLIGKNGSDKSKLLIMDTTLSVENNPIFKGIAEDLDYLLRQYYGSQGGEAEVDTINSDWNQYQNYIDASQFMIGFSFFEESASKGNLWFDVNEYDPNNPEKGKDIEGTRAKKYAEWQPSTGGLKAGIFSYAIDRDGVAHVPSTYKNRTSTNLQRHEVDNISHTDYTVSRKLKTLMTEDKRYDVIDQKDIPDPALREQIIQQVGQYKGDLERYNKTLVLTGDKIQNLKGLEKLSKLQKLELRQLSNVKEITPELLPESMKKDAELVMVGMTGLEKLNLSGLNRQTLDGIDVNSITHLTSFDISHNSLDLSEKSEDRKLLMTLMEQVSNHQKITVKNTAFENQKPKGYYPQTYDTKEGHYDVDNAEHDILTDFVFGTVTKRNTFIGDEEAFAIYKEGAVDGRQYVSKDYTYEAFRKDYKGYKVHLTASNLGETVTSKVTATTDETYLVDVSDGEKVVHHMKLNIGSGAIMMENLAKGAKVIGTSGDFEQAKKIFDGEKSDRFFTWGQTNWIAFDLGEINLAKEWRLFNAETNTEIKTDSSLNVAKGRLQILKDTTIDLEKMDIKNRKEYLSNDENWTDVAQMDDAKAIFNSKLSNVLSRYWRFCVDGGASSYYPQYTELQILGQRLSNDVANTLKDEF

SEQ ID NO: 27 - DNA, 3924 bp, Artificial Sequence
  SYNTHETIC FUSION PROTEN
atgggcagcagccatcatcatcatcatcacagcagcggcctggtgccgcgcggcagccatatgggcagcagccatcatcaccatcaccatgagctccccgggccgcgggaaaacctgtattttcagggagcgatcgctcagcaaaagtatcaaccgacagaggctaacctgaaagcccggagtgaatttcaggacaataagtttggaatcttccttcattggggactctatgccatgctcgctaccggagagtggacgatgacaaacaataacctgaattataaagagtatgccaaactggccgggggattctatccttcgaagtttgatgcagacaaatgggtagcagccatcaaggcttccggagctaaatatatttgcttcactactcgtcatcacgagggattctcgatgttcgataccaagtactctgattataacattgtaaaagcgactcctttcaaacgtgatgtggtgaaggagctggccgatgcatgtgccaaacatggcatcaaacttcacttctattattcacatatagactggtatcgtgaagatgctcctcagggaagaaccggacgtagaaccggacgtcccaatccgaaaggagattggaagagctattatcagtttatgaataatcagttgacagagctgctgactaattatggtccgatcggcgctatctggtttgacggttggtgggatcaggacatcaatcccgatttcgattgggaacttcccgagcaatatgcacttattcatcgtttgcagccggcttgcctggtaggtaacaaccaccatcagacaccttttgccggagaagatattcaaatcttcgagcgtgatttgccgggagagaatactgcaggactttcgggacaaagcgtcagccatctgcctcttgaaacatgtgagacgatgaatggtatgtggggatacaagattacagatcagaattataaatcgactaaaactttgattcactatctggtgaaagctgccggtaaagatgcaaatctgttgatgaacatcggtccgcaacctgatggtgaacttccggaagtggccgttcagcgcttgaaggaagtgggagagtggatgtcgaaatatggtgaaactatttatggaaccagaggcggtctggttgctccgcatgattggggagtaacgactcaaaaaggcaataaactttatgtacacattcttaatttacaggataaggcactcttcttgcctattgtcgataagaaagtgaaaaaggcggtggtctttgctgacaaaacaccggtacgtttcacaaagaataaggaaggaattgtactggaacttgctaaagttccaacggatgtagactacgtggtagaacttacaattgacggatccatggataaacatttgttggtaaaaagaacactagggtgtgtttgtgctgcaacgttgatgggagctgccttagcgacccaccatgattcactcaatactgtaaaagcggaggagaagactgttcaaacaggaaagacagatcagcaggttggtgctaaattggtacaggaaatccgtgaaggaaaacgcggaccactatatgctggttattttaggacatggcatgatcgtgcttcaacaggaatagatggtaaacagcaacatccagaaaatactatggctgaggtcccaaaagaagttgatatcttatttgtttttcatgaccatacagcttcagatagtccattttggtctgaattaaaggacagttatgtccataaattacatcaacagggaacggcacttgttcaggaaattggtgttaacgaattaaatggacgtacaggtttatctaaagattatcctgatactcctgaggggaacaaagctttagcagcagccattgtcaaggcatttgtaactgatcgtggtgtcgatggactagatattgatattgagcacgaatttacgaacaaaagaacacctgaagaagatgctcgtgctctaaatgtttttaaagagattgcgcagttaataggtaaaaatggtagtgataaatctaaattgctcatcatggacactaccctaagtgttgaaaataatccaatatttaaagggatagcggaagatcttgattatcttcttagacaatattatggttcacaaggtggagaagctgaagtggatactataaactctgattggaaccaatatcagaattatattgatgctagccagttcatgattggattctccttttttgaagaatctgcgtccaaagggaatttatggtttgatgttaacgaatacgaccctaacaatcctgaaaaagggaaagatattgaaggaacacgtgctaaaaaatatgcagagtggcaacctagtacaggtggtttaaaagcaggtatattctcttatgctattgatcgtgatggagtggctcatgttccttcaacatataaaaataggactagtacaaatttacaacggcatgaagtcgataatatctcacatactgactacaccgtatctcgaaaattaaaaacattgatgaccgaagacaaacgctatgatgtcattgatcaaaaagacattcctgacccagcattaagagaacaaatcattcaacaagttggacagtataaaggcgatttggaacgttataacaagacattggtgcttacaggagataagattcaaaatcttaaaggactagaaaaattaagcaagttacaaaaattagagttgcgccagctatctaacgttaaagaaattactccagaacttttgccggaaagcatgaaaaaagatgctgagcttgttatggtaggcatgactggtttagaaaaactaaaccttagtggtctaaatcgtcaaactttagacggtatagacgtgaatagtattacgcatttgacatcatttgatatttcacataatagtttggacttgtcggaaaagagtgaagaccgtaaactattaatgactttgatggagcaggtttcaaatcatcaaaaaataacggtgaaaaatacggcttttgaaaatcaaaaaccgaaaggttattatcctcagacgtatgataccaaagaaggtcattatgatgttgataatgcagaacatgatattttaactgattttgtttttggaactgttactaaacgtaatacctttattggagacgaagaagcatttgctatctataaagaaggagctgtcgatggtcgacaatatgtgtctaaagactatacttatgaagcttttcgtaaagactataaaggttacaaggttcatttaactgcttctaacctaggagaaacagttacttctaaggtaactgctactactgatgaaacttacttagtagatgtttctgatggggaaaaagttgttcaccacatgaaactcaatataggatctggtgccatcatgatggaaaatctggcaaaaggggctaaagtgattggtacatctggggactttgagcaagcaaagaagattttcgatggtgaaaagtcagatagattcttcacttggggacaaactaactggatagcttttgatctaggagaaattaatcttgcgaaggaatggcgtttatttaatgcagagacaaatactgaaataaagacagatagtagcttaaacgtggctaaaggacgtcttcagattttaaaagatacaactattgatttagaaaaaatggacataaaaaatcgtaaagagtatctgtcgaatgatgaaaattggactgatgttgctcagatggatgatgcaaaagcgatatttaatagtaaattatccaatgttttatctcggtattggcggttttgtgtagatggtggagctagctcttattaccctcaatataccgaacttcaaatcctcggacaacgtttatcaaatgatgtcgctaatacgctgaaggatgaattctaa

SEQ ID NO: 28 - protein, 1307 aa, Artificial Sequence
  SYNTHETIC FUSION PROTEN
MGSSHHHHHHSSGLVPRGSHMGSSHHHHHHELPGPRENLYFQGAIAQQKYQPTEANLKARSEFQDNKFGIFLHWGLYAMLATGEWTMTNNNLNYKEYAKLAGGFYPSKFDADKWVAAIKASGAKYICFTTRHHEGFSMFDTKYSDYNIVKATPFKRDVVKELADACAKHGIKLHFYYSHIDWYREDAPQGRTGRRTGRPNPKGDWKSYYQFMNNQLTELLTNYGPIGAIWFDGWWDQDINPDFDWELPEQYALIHRLQPACLVGNNHHQTPFAGEDIQIFERDLPGENTAGLSGQSVSHLPLETCETMNGMWGYKITDQNYKSTKTLIHYLVKAAGKDANLLMNIGPQPDGELPEVAVQRLKEVGEWMSKYGETIYGTRGGLVAPHDWGVTTQKGNKLYVHILNLQDKALFLPIVDKKVKKAVVFADKTPVRFTKNKEGIVLELAKVPTDVDYVVELTIDGSMDKHLLVKRTLGCVCAATLMGAALATHHDSLNTVKAEEKTVQTGKTDQQVGAKLVQEIREGKRGPLYAGYFRTWHDRASTGIDGKQQHPENTMAEVPKEVDILFVFHDHTASDSPFWSELKDSYVHKLHQQGTALVQEIGVNELNGRTGLSKDYPDTPEGNKALAAAIVKAFVTDRGVDGLDIDIEHEFTNKRTPEEDARALNVFKEIAQLIGKNGSDKSKLLIMDTTLSVENNPIFKGIAEDLDYLLRQYYGSQGGEAEVDTINSDWNQYQNYIDASQFMIGFSFFEESASKGNLWFDVNEYDPNNPEKGKDIEGTRAKKYAEWQPSTGGLKAGIFSYAIDRDGVAHVPSTYKNRTSTNLQRHEVDNISHTDYTVSRKLKTLMTEDKRYDVIDQKDIPDPALREQIIQQVGQYKGDLERYNKTLVLTGDKIQNLKGLEKLSKLQKLELRQLSNVKEITPELLPESMKKDAELVMVGMTGLEKLNLSGLNRQTLDGIDVNSITHLTSFDISHNSLDLSEKSEDRKLLMTLMEQVSNHQKITVKNTAFENQKPKGYYPQTYDTKEGHYDVDNAEHDILTDFVFGTVTKRNTFIGDEEAFAIYKEGAVDGRQYVSKDYTYEAFRKDYKGYKVHLTASNLGETVTSKVTATTDETYLVDVSDGEKVVHHMKLNIGSGAIMMENLAKGAKVIGTSGDFEQAKKIFDGEKSDRFFTWGQTNWIAFDLGEINLAKEWRLFNAETNTEIKTDSSLNVAKGRLQILKDTTIDLEKMDIKNRKEYLSNDENWTDVAQMDDAKAIFNSKLSNVLSRYWRFCVDGGASSYYPQYTELQILGQRLSNDVANTLKDEF

SEQ ID NO: 29 - DNA, 3924 bp, Artificial Sequence
  SYNTHETIC FUSION PROTEN
atgggcagcagccatcatcatcatcatcacagcagcggcctggtgccgcgcggcagccatatgggcagcagccatcatcaccatcaccatgagctccccgggccgcgggaaaacctgtattttcagggagcgatcgctcagcaaaagtatcaaccgacagaggctaacctgaaagcccggagtgaatttcaggacaataagtttggaatcttccttcattggggactctatgccatgctcgctaccggagagtggacgatgacaaacaataacctgaattataaagagtatgccaaactggccgggggattctatccttcgaagtttgatgcagacaaatgggtagcagccatcaaggcttccggagctaaatatatttgcttcactactcgtcatcacgagggattctcgatgttcgataccaagtactctgattataacattgtaaaagcgactcctttcaaacgtgatgtggtgaaggagctggccgatgcatgtgccaaacatggcatcaaacttcacttctattattcacatatagactggtatcgtgaagatgctcctcagggaagaaccggacgtagaaccggacgtcccaatccgaaaggagattggaagagctattatcagtttatgaataatcagttgacagagctgctgactaattatggtccgatcggcgctatctggtttgacggttggtgggatcaggacatcaatcccgatttcgattgggaacttcccgagcaatatgcacttattcatcgtttgcagccggcttgcctggtaggtaacaaccaccatcagacaccttttgccggagaagatattcaaatcttcgagcgtgatttgccgggagagaatactgcaggactttcgggacaaagcgtcagccatctgcctcttgaaacatgtgagacgatgaatggtatgtggggatacaagattacagatcagaattataaatcgactaaaactttgattcactatctggtgaaagctgccggtaaagatgcaaatctgttgatgaacatcggtccgcaacctgatggtgaacttccggaagtggccgttcagcgcttgaaggaagtgggagagtggatgtcgaaatatggtgaaactatttatggaaccagaggcggtctggttgctccgcatgattggggagtaacgactcaaaaaggcaataaactttatgtacacattcttaatttacaggataaggcactcttcttgcctattgtcgataagaaagtgaaaaaggcggtggtctttgctgacaaaacaccggtacgtttcacaaagaataaggaaggaattgtactggaacttgctaaagttccaacggatgtagactacgtggtagaacttacaattgacggatccatggataaacatttgttggtaaaaagaacactagggtgtgtttgtgctgcaacgttgatgggagctgccttagcgacccaccatgattcactcaatactgtaaaagcggaggagaagactgttcaaacaggaaagacagatcagcaggttggtgctaaattggtacaggaaatccgtgaaggaaaacgcggaccactatatgctggttattttaggacatggcatgatcgtgcttcaacaggaatagatggtaaacagcaacatccagaaaatactatggctgaggtcccaaaagaagttgatatcttatttgtttttcatgaccatacagcttcagatagtccattttggtctgaattaaaggacagttatgtccataaattacatcaacagggaacggcacttgttcagatgattggtgttaacgaattaaatggacgtacaggtttatctaaagattatcctgatactcctgaggggaacaaagctttagcagcagccattgtcaaggcatttgtaactgatcgtggtgtcgatggactagatattgatattgagcacgaatttacgaacaaaagaacacctgaagaagatgctcgtgctctaaatgtttttaaagagattgcgcagttaataggtaaaaatggtagtgataaatctaaattgctcatcatggacactaccctaagtgttgaaaataatccaatatttaaagggatagcggaagatcttgattatcttcttagacaatattatggttcacaaggtggagaagctgaagtggatactataaactctgattggaaccaatatcagaattatattgatgctagccagttcatgattggattctccttttttgaagaatctgcgtccaaagggaatttatggtttgatgttaacgaatacgaccctaacaatcctgaaaaagggaaagatattgaaggaacacgtgctaaaaaatatgcagagtggcaacctagtacaggtggtttaaaagcaggtatattctcttatgctattgatcgtgatggagtggctcatgttccttcaacatataaaaataggactagtacaaatttacaacggcatgaagtcgataatatctcacatactgactacaccgtatctcgaaaattaaaaacattgatgaccgaagacaaacgctatgatgtcattgatcaaaaagacattcctgacccagcattaagagaacaaatcattcaacaagttggacagtataaaggcgatttggaacgttataacaagacattggtgcttacaggagataagattcaaaatcttaaaggactagaaaaattaagcaagttacaaaaattagagttgcgccagctatctaacgttaaagaaattactccagaacttttgccggaaagcatgaaaaaagatgctgagcttgttatggtaggcatgactggtttagaaaaactaaaccttagtggtctaaatcgtcaaactttagacggtatagacgtgaatagtattacgcatttgacatcatttgatatttcacataatagtttggacttgtcggaaaagagtgaagaccgtaaactattaatgactttgatggagcaggtttcaaatcatcaaaaaataacggtgaaaaatacggcttttgaaaatcaaaaaccgaaaggttattatcctcagacgtatgataccaaagaaggtcattatgatgttgataatgcagaacatgatattttaactgattttgtttttggaactgttactaaacgtaatacctttattggagacgaagaagcatttgctatctataaagaaggagctgtcgatggtcgacaatatgtgtctaaagactatacttatgaagcttttcgtaaagactataaaggttacaaggttcatttaactgcttctaacctaggagaaacagttacttctaaggtaactgctactactgatgaaacttacttagtagatgtttctgatggggaaaaagttgttcaccacatgaaactcaatataggatctggtgccatcatgatggaaaatctggcaaaaggggctaaagtgattggtacatctggggactttgagcaagcaaagaagattttcgatggtgaaaagtcagatagattcttcacttggggacaaactaactggatagcttttgatctaggagaaattaatcttgcgaaggaatggcgtttatttaatgcagagacaaatactgaaataaagacagatagtagcttaaacgtggctaaaggacgtcttcagattttaaaagatacaactattgatttagaaaaaatggacataaaaaatcgtaaagagtatctgtcgaatgatgaaaattggactgatgttgctcagatggatgatgcaaaagcgatatttaatagtaaattatccaatgttttatctcggtattggcggttttgtgtagatggtggagctagctcttattaccctcaatataccgaacttcaaatcctcggacaacgtttatcaaatgatgtcgctaatacgctgaaggatgaattctaa

SEQ ID NO: 30 - protein, 1307 aa, Artificial Sequence
  SYNTHETIC FUSION PROTEN
MGSSHHHHHHSSGLVPRGSHMGSSHHHHHHELPGPRENLYFQGAIAQQKYQPTEANLKARSEFQDNKFGIFLHWGLYAMLATGEWTMTNNNLNYKEYAKLAGGFYPSKFDADKWVAAIKASGAKYICFTTRHHEGFSMFDTKYSDYNIVKATPFKRDVVKELADACAKHGIKLHFYYSHIDWYREDAPQGRTGRRTGRPNPKGDWKSYYQFMNNQLTELLTNYGPIGAIWFDGWWDQDINPDFDWELPEQYALIHRLQPACLVGNNHHQTPFAGEDIQIFERDLPGENTAGLSGQSVSHLPLETCETMNGMWGYKITDQNYKSTKTLIHYLVKAAGKDANLLMNIGPQPDGELPEVAVQRLKEVGEWMSKYGETIYGTRGGLVAPHDWGVTTQKGNKLYVHILNLQDKALFLPIVDKKVKKAVVFADKTPVRFTKNKEGIVLELAKVPTDVDYVVELTIDGSMDKHLLVKRTLGCVCAATLMGAALATHHDSLNTVKAEEKTVQTGKTDQQVGAKLVQEIREGKRGPLYAGYFRTWHDRASTGIDGKQQHPENTMAEVPKEVDILFVFHDHTASDSPFWSELKDSYVHKLHQQGTALVQMIGVNELNGRTGLSKDYPDTPEGNKALAAAIVKAFVTDRGVDGLDIDIEHEFTNKRTPEEDARALNVFKEIAQLIGKNGSDKSKLLIMDTTLSVENNPIFKGIAEDLDYLLRQYYGSQGGEAEVDTINSDWNQYQNYIDASQFMIGFSFFEESASKGNLWFDVNEYDPNNPEKGKDIEGTRAKKYAEWQPSTGGLKAGIFSYAIDRDGVAHVPSTYKNRTSTNLQRHEVDNISHTDYTVSRKLKTLMTEDKRYDVIDQKDIPDPALREQIIQQVGQYKGDLERYNKTLVLTGDKIQNLKGLEKLSKLQKLELRQLSNVKEITPELLPESMKKDAELVMVGMTGLEKLNLSGLNRQTLDGIDVNSITHLTSFDISHNSLDLSEKSEDRKLLMTLMEQVSNHQKITVKNTAFENQKPKGYYPQTYDTKEGHYDVDNAEHDILTDFVFGTVTKRNTFIGDEEAFAIYKEGAVDGRQYVSKDYTYEAFRKDYKGYKVHLTASNLGETVTSKVTATTDETYLVDVSDGEKVVHHMKLNIGSGAIMMENLAKGAKVIGTSGDFEQAKKIFDGEKSDRFFTWGQTNWIAFDLGEINLAKEWRLFNAETNTEIKTDSSLNVAKGRLQILKDTTIDLEKMDIKNRKEYLSNDENWTDVAQMDDAKAIFNSKLSNVLSRYWRFCVDGGASSYYPQYTELQILGQRLSNDVANTLKDEF

SEQ ID NO: 31 - DNA, 3924 bp, Artificial Sequence
  SYNTHETIC FUSION PROTEN
atgggcagcagccatcatcatcatcatcacagcagcggcctggtgccgcgcggcagccatatgggcagcagccatcatcaccatcaccatgagctccccgggccgcgggaaaacctgtattttcagggagcgatcgctcagcaaaagtatcaaccgacagaggctaacctgaaagcccggagtgaatttcaggacaataagtttggaatcttccttcattggggactctatgccatgctcgctaccggagagtggacgatgacaaacaataacctgaattataaagagtatgccaaactggccgggggattctatccttcgaagtttgatgcagacaaatgggtagcagccatcaaggcttccggagctaaatatatttgcttcactactcgtcatcacgagggattctcgatgttcgataccaagtactctgattataacattgtaaaagcgactcctttcaaacgtgatgtggtgaaggagctggccgatgcatgtgccaaacatggcatcaaacttcacttctattattcacatatagactggtatcgtgaagatgctcctcagggaagaaccggacgtagaaccggacgtcccaatccgaaaggagattggaagagctattatcagtttatgaataatcagttgacagagctgctgactaattatggtccgatcggcgctatctggtttgacggttggtgggatcaggacatcaatcccgatttcgattgggaacttcccgagcaatatgcacttattcatcgtttgcagccggcttgcctggtaggtaacaaccaccatcagacaccttttgccggagaagatattcaaatcttcgagcgtgatttgccgggagagaatactgcaggactttcgggacaaagcgtcagccatctgcctcttgaaacatgtgagacgatgaatggtatgtggggatacaagattacagatcagaattataaatcgactaaaactttgattcactatctggtgaaagctgccggtaaagatgcaaatctgttgatgaacatcggtccgcaacctgatggtgaacttccggaagtggccgttcagcgcttgaaggaagtgggagagtggatgtcgaaatatggtgaaactatttatggaaccagaggcggtctggttgctccgcatgattggggagtaacgactcaaaaaggcaataaactttatgtacacattcttaatttacaggataaggcactcttcttgcctattgtcgataagaaagtgaaaaaggcggtggtctttgctgacaaaacaccggtacgtttcacaaagaataaggaaggaattgtactggaacttgctaaagttccaacggatgtagactacgtggtagaacttacaattgacggatccatggataaacatttgttggtaaaaagaacactagggtgtgtttgtgctgcaacgttgatgggagctgccttagcgacccaccatgattcactcaatactgtaaaagcggaggagaagactgttcaaacaggaaagacagatcagcaggttggtgctaaattggtacaggaaatccgtgaaggaaaacgcggaccactatatgctggttattttaggacatggcatgatcgtgcttcaacaggaatagatggtaaacagcaacatccagaaaatactatggctgaggtcccaaaagaagttgatatcttatttgtttttcatgaccatacagcttcagatagtccattttggtctgaattaaaggacagttatgtccataaattacatcaacagggaacggcacttgttcagacaattggtgttaacgaattaaatggacgtacaggtttatctaaagattatcctgatactcctgaggggaacaaagctttagcagcagccattgtcaaggcatttgtaactgatcgtggtgtcgatggactagatattatgattgagcacgaatttacgaacaaaagaacacctgaagaagatgctcgtgctctaaatgtttttaaagagattgcgcagttaataggtaaaaatggtagtgataaatctaaattgctcatcatggacactaccctaagtgttgaaaataatccaatatttaaagggatagcggaagatcttgattatcttcttagacaatattatggttcacaaggtggagaagctgaagtggatactataaactctgattggaaccaatatcagaattatattgatgctagccagttcatgattggattctccttttttgaagaatctgcgtccaaagggaatttatggtttgatgttaacgaatacgaccctaacaatcctgaaaaagggaaagatattgaaggaacacgtgctaaaaaatatgcagagtggcaacctagtacaggtggtttaaaagcaggtatattctcttatgctattgatcgtgatggagtggctcatgttccttcaacatataaaaataggactagtacaaatttacaacggcatgaagtcgataatatctcacatactgactacaccgtatctcgaaaattaaaaacattgatgaccgaagacaaacgctatgatgtcattgatcaaaaagacattcctgacccagcattaagagaacaaatcattcaacaagttggacagtataaaggcgatttggaacgttataacaagacattggtgcttacaggagataagattcaaaatcttaaaggactagaaaaattaagcaagttacaaaaattagagttgcgccagctatctaacgttaaagaaattactccagaacttttgccggaaagcatgaaaaaagatgctgagcttgttatggtaggcatgactggtttagaaaaactaaaccttagtggtctaaatcgtcaaactttagacggtatagacgtgaatagtattacgcatttgacatcatttgatatttcacataatagtttggacttgtcggaaaagagtgaagaccgtaaactattaatgactttgatggagcaggtttcaaatcatcaaaaaataacggtgaaaaatacggcttttgaaaatcaaaaaccgaaaggttattatcctcagacgtatgataccaaagaaggtcattatgatgttgataatgcagaacatgatattttaactgattttgtttttggaactgttactaaacgtaatacctttattggagacgaagaagcatttgctatctataaagaaggagctgtcgatggtcgacaatatgtgtctaaagactatacttatgaagcttttcgtaaagactataaaggttacaaggttcatttaactgcttctaacctaggagaaacagttacttctaaggtaactgctactactgatgaaacttacttagtagatgtttctgatggggaaaaagttgttcaccacatgaaactcaatataggatctggtgccatcatgatggaaaatctggcaaaaggggctaaagtgattggtacatctggggactttgagcaagcaaagaagattttcgatggtgaaaagtcagatagattcttcacttggggacaaactaactggatagcttttgatctaggagaaattaatcttgcgaaggaatggcgtttatttaatgcagagacaaatactgaaataaagacagatagtagcttaaacgtggctaaaggacgtcttcagattttaaaagatacaactattgatttagaaaaaatggacataaaaaatcgtaaagagtatctgtcgaatgatgaaaattggactgatgttgctcagatggatgatgcaaaagcgatatttaatagtaaattatccaatgttttatctcggtattggcggttttgtgtagatggtggagctagctcttattaccctcaatataccgaacttcaaatcctcggacaacgtttatcaaatgatgtcgctaatacgctgaaggatgaattctaa

SEQ ID NO: 32 - protein, 1307 aa, Artificial Sequence
  SYNTHETIC FUSION PROTEN
MGSSHHHHHHSSGLVPRGSHMGSSHHHHHHELPGPRENLYFQGAIAQQKYQPTEANLKARSEFQDNKFGIFLHWGLYAMLATGEWTMTNNNLNYKEYAKLAGGFYPSKFDADKWVAAIKASGAKYICFTTRHHEGFSMFDTKYSDYNIVKATPFKRDVVKELADACAKHGIKLHFYYSHIDWYREDAPQGRTGRRTGRPNPKGDWKSYYQFMNNQLTELLTNYGPIGAIWFDGWWDQDINPDFDWELPEQYALIHRLQPACLVGNNHHQTPFAGEDIQIFERDLPGENTAGLSGQSVSHLPLETCETMNGMWGYKITDQNYKSTKTLIHYLVKAAGKDANLLMNIGPQPDGELPEVAVQRLKEVGEWMSKYGETIYGTRGGLVAPHDWGVTTQKGNKLYVHILNLQDKALFLPIVDKKVKKAVVFADKTPVRFTKNKEGIVLELAKVPTDVDYVVELTIDGSMDKHLLVKRTLGCVCAATLMGAALATHHDSLNTVKAEEKTVQTGKTDQQVGAKLVQEIREGKRGPLYAGYFRTWHDRASTGIDGKQQHPENTMAEVPKEVDILFVFHDHTASDSPFWSELKDSYVHKLHQQGTALVQTIGVNELNGRTGLSKDYPDTPEGNKALAAAIVKAFVTDRGVDGLDIMIEHEFTNKRTPEEDARALNVFKEIAQLIGKNGSDKSKLLIMDTTLSVENNPIFKGIAEDLDYLLRQYYGSQGGEAEVDTINSDWNQYQNYIDASQFMIGFSFFEESASKGNLWFDVNEYDPNNPEKGKDIEGTRAKKYAEWQPSTGGLKAGIFSYAIDRDGVAHVPSTYKNRTSTNLQRHEVDNISHTDYTVSRKLKTLMTEDKRYDVIDQKDIPDPALREQIIQQVGQYKGDLERYNKTLVLTGDKIQNLKGLEKLSKLQKLELRQLSNVKEITPELLPESMKKDAELVMVGMTGLEKLNLSGLNRQTLDGIDVNSITHLTSFDISHNSLDLSEKSEDRKLLMTLMEQVSNHQKITVKNTAFENQKPKGYYPQTYDTKEGHYDVDNAEHDILTDFVFGTVTKRNTFIGDEEAFAIYKEGAVDGRQYVSKDYTYEAFRKDYKGYKVHLTASNLGETVTSKVTATTDETYLVDVSDGEKVVHHMKLNIGSGAIMMENLAKGAKVIGTSGDFEQAKKIFDGEKSDRFFTWGQTNWIAFDLGEINLAKEWRLFNAETNTEIKTDSSLNVAKGRLQILKDTTIDLEKMDIKNRKEYLSNDENWTDVAQMDDAKAIFNSKLSNVLSRYWRFCVDGGASSYYPQYTELQILGQRLSNDVANTLKDEF

SEQ ID NO: 33 - DNA, 2772 bp, Artificial Sequence
  SYNTHETIC FUSION PROTEN
atgggcagcagccatcatcatcatcatcacagcagcggcctggtgccgcgcggcagccatatgggtaccctgcagggatccaaagataagtcgtatgatctgattgatgagaaagatttcccagataaggctttgcgagaagctgtgatggcgcaggttggaaccagaaaaggtgatttggaacgtttcaatggcacattacgattggataatccagcgattcaaagtttagaaggtctaaataaatttaaaaaattagctcaattagacttgattggcttatctcgcattacaaagctcgaccgttctgttttacccgctaatatgaagccaggcaaagataccttggaaacagttcttgaaacctataaaaaggataacaaagaagaacctgctactatcccaccagtatctttgaaggtttctggtttaactggtctgaaagaattagatttgtcaggttttgaccgtgaaaccttggctggtcttgatgccgctactctaacgtctttagaaaaagttgatatttctggcaacaaacttgatttggctccaggaacagaaaatcgacaaatttttgatactatgctatcaactatcagcaatcatgttggaagcaatgaacaaacagtgaaatttgacaagcaaaaaccaactgggcattacccagatacctatgggaaaactagtctgcgcttaccagtggcaaatgaaaaagttgatttgcaaagccagcttttgtttgggactgtgacaaatcaaggaaccctaatcaatagcgaagcagactataaggcttaccaaaatcataaaattgctggacgtagctttgttgattcaaactatcattacaataactttaaagtttcttatgagaactataccgttaaagtaactgattccacattgggaaccactactgacaaaacgctagcaactgataaagaagagacctataaggttgacttctttagcccagcagataagacaaaagctgttcatactgctaaagtgattgttggtgacgaaaaaaccatgatggttaatttggcagaaggcgcaacagttattggaggaagtgctgatcctgtaaatgcaagaaaggtatttgatgggcaactgggcagtgagactgataatatctctttaggatgggattctaagcaaagtattatatttaaattgaaagaagatggattaataaagcattggcgtttcttcaatgattcagcccgaaatcctgagacaaccaataaacctattcaggaagcaagtctacaaatttttaatatcaaagattataatctagataatttgttggaaaatcccaataaatttgatgatgaaaaatattggattactgtagatacttacagtgcacaaggagagagagctactgcattcagtaatacattaaataatattactagtaaatattggcgagttgtctttgatactaaaggagatagatatagttcgccagtagtccctgaactccaaattttaggttatccgttacctaacgccgacactatcatgaaaacagtaactactgctaaagagttatctcaacaaaaagataagttttctcaaaagatgcttgatgagttaaaaataaaagagatggctttagaaacttctttgaacagtaagatttttgatgtaactgctattaatgctaatgctggagttttgaaagattgtattgagaaaaggcagctgctaaaaaaaggcggtgcaaacgacaacgtggcgtggttcaagcaggcgaaatatggcatgatgattcactggggtctgtacagcctgctggcgggcgagtatcgtggtgaaagcagcagcgcgtacgcggagtggatccagagcaagtttcaaattccgaacgcggaatacggcaacctggcgaccgcgttcaacccgctgtattttgatgcgaagaaaatcgttgcgctggcgaaacagtgcggcatgcaatacctggtggttaccaccaagcaccacgacggtttcgcgatgtatcacagcaaagtggacgcgtacaacgtttatgatgcgaccccgtttcaccgtgatatcattggcgagctggcggaagcgtgccagaaggcgggtctgaaattcggtctgtactatagccaagacctggattggcacgacccgaacggtggcggttataagagcaacgatgtggagaccgcgggtaccacctgggacaacagctgggatttcccggacgaagatcagaaaaacttcgacctgtgctttgataacaagatcctgccgcaaatcaaagagattatgagcaactacggtgacattgcgaccgcgtggtttgatgtgccgatgaccctgagcgaggcgcagagccaaaccatctatgacaccgttcgtgaactgcaaccgaactgcctgattaacagccgtctgggcaacggcaagtacgacttcgtgagcctgggcgataacgagatcccgaagaacaaagaagatatgaacaagaccgacgttgattacaacgagattaccggcttcaaaccgagcccgctgggcctgtatgaaaccgcgggtaccatcaacgacagctggggttttagctaccacgatcagaactggaagaccccgcgtaccctgtaccgttataaacaacacctgaacgactttggtattaactacctgctgaacgtgggcctggatccgctgggtcgtgttccgatgatggcggaggaaaacctgctggcggcgaaagcgctggaggacgaagcgaaccgttaa

SEQ ID NO: 34 - protein, 923 aa, Artificial Sequence
  SYNTHETIC FUSION PROTEN
MGSSHHHHHHSSGLVPRGSHMGTLQGSKDKSYDLIDEKDFPDKALREAVMAQVGTRKGDLERFNGTLRLDNPAIQSLEGLNKFKKLAQLDLIGLSRITKLDRSVLPANMKPGKDTLETVLETYKKDNKEEPATIPPVSLKVSGLTGLKELDLSGFDRETLAGLDAATLTSLEKVDISGNKLDLAPGTENRQIFDTMLSTISNHVGSNEQTVKFDKQKPTGHYPDTYGKTSLRLPVANEKVDLQSQLLFGTVTNQGTLINSEADYKAYQNHKIAGRSFVDSNYHYNNFKVSYENYTVKVTDSTLGTTTDKTLATDKEETYKVDFFSPADKTKAVHTAKVIVGDEKTMMVNLAEGATVIGGSADPVNARKVFDGQLGSETDNISLGWDSKQSIIFKLKEDGLIKHWRFFNDSARNPETTNKPIQEASLQIFNIKDYNLDNLLENPNKFDDEKYWITVDTYSAQGERATAFSNTLNNITSKYWRVVFDTKGDRYSSPVVPELQILGYPLPNADTIMKTVTTAKELSQQKDKFSQKMLDELKIKEMALETSLNSKIFDVTAINANAGVLKDCIEKRQLLKKGGANDNVAWFKQAKYGMMIHWGLYSLLAGEYRGESSSAYAEWIQSKFQIPNAEYGNLATAFNPLYFDAKKIVALAKQCGMQYLVVTTKHHDGFAMYHSKVDAYNVYDATPFHRDIIGELAEACQKAGLKFGLYYSQDLDWHDPNGGGYKSNDVETAGTTWDNSWDFPDEDQKNFDLCFDNKILPQIKEIMSNYGDIATAWFDVPMTLSEAQSQTIYDTVRELQPNCLINSRLGNGKYDFVSLGDNEIPKNKEDMNKTDVDYNEITGFKPSPLGLYETAGTINDSWGFSYHDQNWKTPRTLYRYKQHLNDFGINYLLNVGLDPLGRVPMMAEENLLAAKALEDEANR

SEQ ID NO: 35 - DNA, 2499 bp, Artificial Sequence
  SYNTHETIC FUSION PROTEN
atgggcagcagccatcatcatcatcatcacagcagcggcctggtgccgcgcggcagccatatgggtaccctgcagggatccaccgaagacaaacgctatgatgtcattgatcaaaaagacattcctgacccagcattaagagaacaaatcattcaacaagttggacagtataaaggcgatttggaacgttataacaagacattggtgcttacaggagataagattcaaaatcttaaaggactagaaaaattaagcaagttacaaaaattagagttgcgccagctatctaacgttaaagaaattactccagaacttttgccggaaagcatgaaaaaagatgctgagcttgttatggtaggcatgactggtttagaaaaactaaaccttagtggtctaaatcgtcaaactttagacggtatagacgtgaatagtattacgcatttgacatcatttgatatttcacataatagtttggacttgtcggaaaagagtgaagaccgtaaactattaatgactttgatggagcaggtttcaaatcatcaaaaaataacggtgaaaaatacggcttttgaaaatcaaaaaccgaaaggttattatcctcagacgtatgataccaaagaaggtcattatgatgttgataatgcagaacatgatattttaactgattttgtttttggaactgttactaaacgtaatacctttattggagacgaagaagcatttgctatctataaagaaggagctgtcgatggtcgacaatatgtgtctaaagactatacttatgaagcttttcgtaaagactataaaggttacaaggttcatttaactgcttctaacctaggagaaacagttacttctaaggtaactgctactactgatgaaacttacttagtagatgtttctgatggggaaaaagttgttcaccacatgaaactcaatataggatctggtgccatcatgatggaaaatctggcaaaaggggctaaagtgattggtacatctggggactttgagcaagcaaagaagattttcgatggtgaaaagtcagatagattcttcacttggggacaaactaactggatagcttttgatctaggagaaattaatcttgcgaaggaatggcgtttatttaatgcagagacaaatactgaaataaagacagatagtagcttaaacgtggctaaaggacgtcttcagattttaaaagatacaactattgatttagaaaaaatggacataaaaaatcgtaaagagtatctgtcgaatgatgaaaattggactgatgttgctcagatggatgatgcaaaagcgatatttaatagtaaattatccaatgttttatctcggtattggcggttttgtgtagatggtggagctagctcttattaccctcaatataccgaacttcaaatcctcggacaacgtttatcaaatgatgtcgctaatacgctgaaggatggcggtgcaaacgacaacgtggcgtggttcaagcaggcgaaatatggcatgatgattcactggggtctgtacagcctgctggcgggcgagtatcgtggtgaaagcagcagcgcgtacgcggagtggatccagagcaagtttcaaattccgaacgcggaatacggcaacctggcgaccgcgttcaacccgctgtattttgatgcgaagaaaatcgttgcgctggcgaaacagtgcggcatgcaatacctggtggttaccaccaagcaccacgacggtttcgcgatgtatcacagcaaagtggacgcgtacaacgtttatgatgcgaccccgtttcaccgtgatatcattggcgagctggcggaagcgtgccagaaggcgggtctgaaattcggtctgtactatagccaagacctggattggcacgacccgaacggtggcggttataagagcaacgatgtggagaccgcgggtaccacctgggacaacagctgggatttcccggacgaagatcagaaaaacttcgacctgtgctttgataacaagatcctgccgcaaatcaaagagattatgagcaactacggtgacattgcgaccgcgtggtttgatgtgccgatgaccctgagcgaggcgcagagccaaaccatctatgacaccgttcgtgaactgcaaccgaactgcctgattaacagccgtctgggcaacggcaagtacgacttcgtgagcctgggcgataacgagatcccgaagaacaaagaagatatgaacaagaccgacgttgattacaacgagattaccggcttcaaaccgagcccgctgggcctgtatgaaaccgcgggtaccatcaacgacagctggggttttagctaccacgatcagaactggaagaccccgcgtaccctgtaccgttataaacaacacctgaacgactttggtattaactacctgctgaacgtgggcctggatccgctgggtcgtgttccgatgatggcggaggaaaacctgctggcggcgaaagcgctggaggacgaagcgaaccgttaa

SEQ ID NO: 36 - protein, 832 aa, Artificial Sequence
  SYNTHETIC FUSION PROTEN
MGSSHHHHHHSSGLVPRGSHMGTLQGSTEDKRYDVIDQKDIPDPALREQIIQQVGQYKGDLERYNKTLVLTGDKIQNLKGLEKLSKLQKLELRQLSNVKEITPELLPESMKKDAELVMVGMTGLEKLNLSGLNRQTLDGIDVNSITHLTSFDISHNSLDLSEKSEDRKLLMTLMEQVSNHQKITVKNTAFENQKPKGYYPQTYDTKEGHYDVDNAEHDILTDFVFGTVTKRNTFIGDEEAFAIYKEGAVDGRQYVSKDYTYEAFRKDYKGYKVHLTASNLGETVTSKVTATTDETYLVDVSDGEKVVHHMKLNIGSGAIMMENLAKGAKVIGTSGDFEQAKKIFDGEKSDRFFTWGQTNWIAFDLGEINLAKEWRLFNAETNTEIKTDSSLNVAKGRLQILKDTTIDLEKMDIKNRKEYLSNDENWTDVAQMDDAKAIFNSKLSNVLSRYWRFCVDGGASSYYPQYTELQILGQRLSNDVANTLKDGGANDNVAWFKQAKYGMMIHWGLYSLLAGEYRGESSSAYAEWIQSKFQIPNAEYGNLATAFNPLYFDAKKIVALAKQCGMQYLVVTTKHHDGFAMYHSKVDAYNVYDATPFHRDIIGELAEACQKAGLKFGLYYSQDLDWHDPNGGGYKSNDVETAGTTWDNSWDFPDEDQKNFDLCFDNKILPQIKEIMSNYGDIATAWFDVPMTLSEAQSQTIYDTVRELQPNCLINSRLGNGKYDFVSLGDNEIPKNKEDMNKTDVDYNEITGFKPSPLGLYETAGTINDSWGFSYHDQNWKTPRTLYRYKQHLNDFGINYLLNVGLDPLGRVPMMAEENLLAAKALEDEANR

SEQ ID NO: 37 - DNA, 4047 bp, Artificial Sequence
  SYNTHETIC FUSION PROTEN
atgggcagcagccatcatcatcatcatcacagcagcggcctggtgccgcgcggcagccatatgacccaccatgattcactcaatactgtaaaagcggaggagaagactgttcaggttcagaaaggattaccttctatcgatagcttgcattatctgtcagagaatagcaaaaaagaatttaaagaagaactctcaaaagcggggcaagaatctcaaaaggtcaaagagatattagcaaaagctcagcaggcagataaacaagctcaagaacttgccaaaatgaaaattcctgagaaaataccgatgaaaccgttacatggttctctctacggtggttactttagaacttggcatgacaaaacatcagatccaacagaaaaagacaaagttaactcgatgggagagcttcctaaagaagtagatctagcctttattttccacgattggacaaaagattatagccttttttggaaagaattggccaccaaacatgtgccaaagttaaacaagcaagggacacgtgtcattcgtaccattccatggcgtttcctagctgggggtgataacagtggtattgcagaagataccagtaaatacccaaatacaccagagggaaataaagctttagccaaagctattgttgatgaatatgtttataaatacaaccttgatggcttagatgtggatgttgaacatgatagtattccaaaagttgacaaaaaagaagatacagcaggcgtagaacgctctattcaagtgtttgaagaaattgggaaattaattggaccaaaaggtgttgataaatcgcggttatttattatggatagcacctacatggctgataaaaacccattgattgagcgaggagctccttatattaatttattactggtacaggtctatggttcacaaggagagaaaggtggttgggagcctgtttctaatcgacctgaaaaaacaatggaagaacgatggcaaggttatagcaagtatattcgtcctgaacaatacatgattggtttttctttctatgaggaaaatgctcaagaagggaatctttggtatgatattaattctcgcaaggacgaggacaaagcaaatggaattaacactgacataactggaacgcgtgccgaacggtatgcaaggtggcaacctaagacaggtggggttaagggaggtatcttctcctacgctattgaccgagatggtgtagctcatcaacctaaaaaatatgctaaacagaaagagtttaaggacgcaactgataacatcttccactcagattatagtgtctccaaggcattaaagacagttatgctaaaagataagtcgtatgatctgattgatgagaaagatttcccagataaggctttgcgagaagctgtgatggcgcaggttggaaccagaaaaggtgatttggaacgtttcaatggcacattacgattggataatccagcgattcaaagtttagaaggtctaaataaatttaaaaaattagctcaattagacttgattggcttatctcgcattacaaagctcgaccgttctgttttacccgctaatatgaagccaggcaaagataccttggaaacagttcttgaaacctataaaaaggataacaaagaagaacctgctactatcccaccagtatctttgaaggtttctggtttaactggtctgaaagaattagatttgtcaggttttgaccgtgaaaccttggctggtcttgatgccgctactctaacgtctttagaaaaagttgatatttctggcaacaaacttgatttggctccaggaacagaaaatcgacaaatttttgatactatgctatcaactatcagcaatcatgttggaagcaatgaacaaacagtgaaatttgacaagcaaaaaccaactgggcattacccagatacctatgggaaaactagtctgcgcttaccagtggcaaatgaaaaagttgatttgcaaagccagcttttgtttgggactgtgacaaatcaaggaaccctaatcaatagcgaagcagactataaggcttaccaaaatcataaaattgctggacgtagctttgttgattcaaactatcattacaataactttaaagtttcttatgagaactataccgttaaagtaactgattccacattgggaaccactactgacaaaacgctagcaactgataaagaagagacctataaggttgacttctttagcccagcagataagacaaaagctgttcatactgctaaagtgattgttggtgacgaaaaaaccatgatggttaatttggcagaaggcgcaacagttattggaggaagtgctgatcctgtaaatgcaagaaaggtatttgatgggcaactgggcagtgagactgataatatctctttaggatgggattctaagcaaagtattatatttaaattgaaagaagatggattaataaagcattggcgtttcttcaatgattcagcccgaaatcctgagacaaccaataaacctattcaggaagcaagtctacaaatttttaatatcaaagattataatctagataatttgttggaaaatcccaataaatttgatgatgaaaaatattggattactgtagatacttacagtgcacaaggagagagagctactgcattcagtaatacattaaataatattactagtaaatattggcgagttgtctttgatactaaaggagatagatatagttcgccagtagtccctgaactccaaattttaggttatccgttacctaacgccgacactatcatgaaaacagtaactactgctaaagagttatctcaacaaaaagataagttttctcaaaagatgcttgatgagttaaaaataaaagagatggctttagaaacttctttgaacagtaagatttttgatgtaactgctattaatgctaatgctggagttttgaaagattgtattgagaaaaggcagctgctaaaaaaaggatccggtgctaacgacaacgtggcgtggttcaagcaggcgaaatatggcatgatgattcactggggtctgtacagcctgctggcgggcgagtatcgtggtgaaagcagcagcgcgtacgcggagtggatccagagcaagtttcaaattccgaacgcggaatacggcaacctggcgaccgcgttcaacccgctgtattttgatgcgaagaaaatcgttgcgctggcgaaacagtgcggcatgcaatacctggtggttaccaccaagcaccacgacggtttcgcgatgtatcacagcaaagtggacgcgtacaacgtttatgatgcgaccccgtttcaccgtgatatcattggcgagctggcggaagcgtgccagaaggcgggtctgaaattcggtctgtactatagccaagacctggattggcacgacccgaacggtggcggttataagagcaacgatgtggagaccgcgggtaccacctgggacaacagctgggatttcccggacgaagatcagaaaaacttcgacctgtgctttgataacaagatcctgccgcaaatcaaagagattatgagcaactacggtgacattgcgaccgcgtggtttgatgtgccgatgaccctgagcgaggcgcagagccaaaccatctatgacaccgttcgtgaactgcaaccgaactgcctgattaacagccgtctgggcaacggcaagtacgacttcgtgagcctgggcgataacgagatcccgaagaacaaagaagatatgaacaagaccgacgttgattacaacgagattaccggcttcaaaccgagcccgctgggcctgtatgaaaccgcgggtaccatcaacgacagctggggttttagctaccacgatcagaactggaagaccccgcgtaccctgtaccgttataaacaacacctgaacgactttggtattaactacctgctgaacgtgggcctggatccgctgggtcgtgttccgatgatggcggaggaaaacctgctggcggcgaaagcgctggaggacgaagcgaaccgtggtacctggtctcatccgcagttcgagaaataa

SEQ ID NO: 38 - protein, 1348 aa, Artificial Sequence
  SYNTHETIC FUSION PROTEN
MGSSHHHHHHSSGLVPRGSHMTHHDSLNTVKAEEKTVQVQKGLPSIDSLHYLSENSKKEFKEELSKAGQESQKVKEILAKAQQADKQAQELAKMKIPEKIPMKPLHGSLYGGYFRTWHDKTSDPTEKDKVNSMGELPKEVDLAFIFHDWTKDYSLFWKELATKHVPKLNKQGTRVIRTIPWRFLAGGDNSGIAEDTSKYPNTPEGNKALAKAIVDEYVYKYNLDGLDVDVEHDSIPKVDKKEDTAGVERSIQVFEEIGKLIGPKGVDKSRLFIMDSTYMADKNPLIERGAPYINLLLVQVYGSQGEKGGWEPVSNRPEKTMEERWQGYSKYIRPEQYMIGFSFYEENAQEGNLWYDINSRKDEDKANGINTDITGTRAERYARWQPKTGGVKGGIFSYAIDRDGVAHQPKKYAKQKEFKDATDNIFHSDYSVSKALKTVMLKDKSYDLIDEKDFPDKALREAVMAQVGTRKGDLERFNGTLRLDNPAIQSLEGLNKFKKLAQLDLIGLSRITKLDRSVLPANMKPGKDTLETVLETYKKDNKEEPATIPPVSLKVSGLTGLKELDLSGFDRETLAGLDAATLTSLEKVDISGNKLDLAPGTENRQIFDTMLSTISNHVGSNEQTVKFDKQKPTGHYPDTYGKTSLRLPVANEKVDLQSQLLFGTVTNQGTLINSEADYKAYQNHKIAGRSFVDSNYHYNNFKVSYENYTVKVTDSTLGTTTDKTLATDKEETYKVDFFSPADKTKAVHTAKVIVGDEKTMMVNLAEGATVIGGSADPVNARKVFDGQLGSETDNISLGWDSKQSIIFKLKEDGLIKHWRFFNDSARNPETTNKPIQEASLQIFNIKDYNLDNLLENPNKFDDEKYWITVDTYSAQGERATAFSNTLNNITSKYWRVVFDTKGDRYSSPVVPELQILGYPLPNADTIMKTVTTAKELSQQKDKFSQKMLDELKIKEMALETSLNSKIFDVTAINANAGVLKDCIEKRQLLKKGSGANDNVAWFKQAKYGMMIHWGLYSLLAGEYRGESSSAYAEWIQSKFQIPNAEYGNLATAFNPLYFDAKKIVALAKQCGMQYLVVTTKHHDGFAMYHSKVDAYNVYDATPFHRDIIGELAEACQKAGLKFGLYYSQDLDWHDPNGGGYKSNDVETAGTTWDNSWDFPDEDQKNFDLCFDNKILPQIKEIMSNYGDIATAWFDVPMTLSEAQSQTIYDTVRELQPNCLINSRLGNGKYDFVSLGDNEIPKNKEDMNKTDVDYNEITGFKPSPLGLYETAGTINDSWGFSYHDQNWKTPRTLYRYKQHLNDFGINYLLNVGLDPLGRVPMMAEENLLAAKALEDEANRGTWSHPQFEK

SEQ ID NO: 39 - DNA, 4047 bp, Artificial Sequence
  SYNTHETIC FUSION PROTEN
atgggcagcagccatcatcatcatcatcacagcagcggcctggtgccgcgcggcagccatatgacccaccatgattcactcaatactgtaaaagcggaggagaagactgttcaggttcagaaaggattaccttctatcgatagcttgcattatctgtcagagaatagcaaaaaagaatttaaagaagaactctcaaaagcggggcaagaatctcaaaaggtcaaagagatattagcaaaagctcagcaggcagataaacaagctcaagaacttgccaaaatgaaaattcctgagaaaataccgatgaaaccgttacatggttctctctacggtggttactttagaacttggcatgacaaaacatcagatccaacagaaaaagacaaagttaactcgatgggagagcttcctaaagaagtagatctagcctttattttccacgattggacaaaagattatagccttttttggaaagaattggccaccaaacatgtgccaaagttaaacaagcaagggacacgtgtcattcgtaccattccatggcgtttcctagctgggggtgataacagtggtattgcagaagataccagtaaatacccaaatacaccagagggaaataaagctttagccaaagctattgttgatgaatatgtttataaatacaaccttgatggcttagatgtgcaggttgaacatgatagtattccaaaagttgacaaaaaagaagatacagcaggcgtagaacgctctattcaagtgtttgaagaaattgggaaattaattggaccaaaaggtgttgataaatcgcggttatttattatggatagcacctacatggctgataaaaacccattgattgagcgaggagctccttatattaatttattactggtacaggtctatggttcacaaggagagaaaggtggttgggagcctgtttctaatcgacctgaaaaaacaatggaagaacgatggcaaggttatagcaagtatattcgtcctgaacaatacatgattggtttttctttctatgaggaaaatgctcaagaagggaatctttggtatgatattaattctcgcaaggacgaggacaaagcaaatggaattaacactgacataactggaacgcgtgccgaacggtatgcaaggtggcaacctaagacaggtggggttaagggaggtatcttctcctacgctattgaccgagatggtgtagctcatcaacctaaaaaatatgctaaacagaaagagtttaaggacgcaactgataacatcttccactcagattatagtgtctccaaggcattaaagacagttatgctaaaagataagtcgtatgatctgattgatgagaaagatttcccagataaggctttgcgagaagctgtgatggcgcaggttggaaccagaaaaggtgatttggaacgtttcaatggcacattacgattggataatccagcgattcaaagtttagaaggtctaaataaatttaaaaaattagctcaattagacttgattggcttatctcgcattacaaagctcgaccgttctgttttacccgctaatatgaagccaggcaaagataccttggaaacagttcttgaaacctataaaaaggataacaaagaagaacctgctactatcccaccagtatctttgaaggtttctggtttaactggtctgaaagaattagatttgtcaggttttgaccgtgaaaccttggctggtcttgatgccgctactctaacgtctttagaaaaagttgatatttctggcaacaaacttgatttggctccaggaacagaaaatcgacaaatttttgatactatgctatcaactatcagcaatcatgttggaagcaatgaacaaacagtgaaatttgacaagcaaaaaccaactgggcattacccagatacctatgggaaaactagtctgcgcttaccagtggcaaatgaaaaagttgatttgcaaagccagcttttgtttgggactgtgacaaatcaaggaaccctaatcaatagcgaagcagactataaggcttaccaaaatcataaaattgctggacgtagctttgttgattcaaactatcattacaataactttaaagtttcttatgagaactataccgttaaagtaactgattccacattgggaaccactactgacaaaacgctagcaactgataaagaagagacctataaggttgacttctttagcccagcagataagacaaaagctgttcatactgctaaagtgattgttggtgacgaaaaaaccatgatggttaatttggcagaaggcgcaacagttattggaggaagtgctgatcctgtaaatgcaagaaaggtatttgatgggcaactgggcagtgagactgataatatctctttaggatgggattctaagcaaagtattatatttaaattgaaagaagatggattaataaagcattggcgtttcttcaatgattcagcccgaaatcctgagacaaccaataaacctattcaggaagcaagtctacaaatttttaatatcaaagattataatctagataatttgttggaaaatcccaataaatttgatgatgaaaaatattggattactgtagatacttacagtgcacaaggagagagagctactgcattcagtaatacattaaataatattactagtaaatattggcgagttgtctttgatactaaaggagatagatatagttcgccagtagtccctgaactccaaattttaggttatccgttacctaacgccgacactatcatgaaaacagtaactactgctaaagagttatctcaacaaaaagataagttttctcaaaagatgcttgatgagttaaaaataaaagagatggctttagaaacttctttgaacagtaagatttttgatgtaactgctattaatgctaatgctggagttttgaaagattgtattgagaaaaggcagctgctaaaaaaaggatccggtgctaacgacaacgtggcgtggttcaagcaggcgaaatatggcatgatgattcactggggtctgtacagcctgctggcgggcgagtatcgtggtgaaagcagcagcgcgtacgcggagtggatccagagcaagtttcaaattccgaacgcggaatacggcaacctggcgaccgcgttcaacccgctgtattttgatgcgaagaaaatcgttgcgctggcgaaacagtgcggcatgcaatacctggtggttaccaccaagcaccacgacggtttcgcgatgtatcacagcaaagtggacgcgtacaacgtttatgatgcgaccccgtttcaccgtgatatcattggcgagctggcggaagcgtgccagaaggcgggtctgaaattcggtctgtactatagccaagacctggattggcacgacccgaacggtggcggttataagagcaacgatgtggagaccgcgggtaccacctgggacaacagctgggatttcccggacgaagatcagaaaaacttcgacctgtgctttgataacaagatcctgccgcaaatcaaagagattatgagcaactacggtgacattgcgaccgcgtggtttgatgtgccgatgaccctgagcgaggcgcagagccaaaccatctatgacaccgttcgtgaactgcaaccgaactgcctgattaacagccgtctgggcaacggcaagtacgacttcgtgagcctgggcgataacgagatcccgaagaacaaagaagatatgaacaagaccgacgttgattacaacgagattaccggcttcaaaccgagcccgctgggcctgtatgaaaccgcgggtaccatcaacgacagctggggttttagctaccacgatcagaactggaagaccccgcgtaccctgtaccgttataaacaacacctgaacgactttggtattaactacctgctgaacgtgggcctggatccgctgggtcgtgttccgatgatggcggaggaaaacctgctggcggcgaaagcgctggaggacgaagcgaaccgtggtacctggtctcatccgcagttcgagaaataa

SEQ ID NO: 40 - protein, 1348 aa, Artificial Sequence
  SYNTHETIC FUSION PROTEN
MGSSHHHHHHSSGLVPRGSHMTHHDSLNTVKAEEKTVQVQKGLPSIDSLHYLSENSKKEFKEELSKAGQESQKVKEILAKAQQADKQAQELAKMKIPEKIPMKPLHGSLYGGYFRTWHDKTSDPTEKDKVNSMGELPKEVDLAFIFHDWTKDYSLFWKELATKHVPKLNKQGTRVIRTIPWRFLAGGDNSGIAEDTSKYPNTPEGNKALAKAIVDEYVYKYNLDGLDVQVEHDSIPKVDKKEDTAGVERSIQVFEEIGKLIGPKGVDKSRLFIMDSTYMADKNPLIERGAPYINLLLVQVYGSQGEKGGWEPVSNRPEKTMEERWQGYSKYIRPEQYMIGFSFYEENAQEGNLWYDINSRKDEDKANGINTDITGTRAERYARWQPKTGGVKGGIFSYAIDRDGVAHQPKKYAKQKEFKDATDNIFHSDYSVSKALKTVMLKDKSYDLIDEKDFPDKALREAVMAQVGTRKGDLERFNGTLRLDNPAIQSLEGLNKFKKLAQLDLIGLSRITKLDRSVLPANMKPGKDTLETVLETYKKDNKEEPATIPPVSLKVSGLTGLKELDLSGFDRETLAGLDAATLTSLEKVDISGNKLDLAPGTENRQIFDTMLSTISNHVGSNEQTVKFDKQKPTGHYPDTYGKTSLRLPVANEKVDLQSQLLFGTVTNQGTLINSEADYKAYQNHKIAGRSFVDSNYHYNNFKVSYENYTVKVTDSTLGTTTDKTLATDKEETYKVDFFSPADKTKAVHTAKVIVGDEKTMMVNLAEGATVIGGSADPVNARKVFDGQLGSETDNISLGWDSKQSIIFKLKEDGLIKHWRFFNDSARNPETTNKPIQEASLQIFNIKDYNLDNLLENPNKFDDEKYWITVDTYSAQGERATAFSNTLNNITSKYWRVVFDTKGDRYSSPVVPELQILGYPLPNADTIMKTVTTAKELSQQKDKFSQKMLDELKIKEMALETSLNSKIFDVTAINANAGVLKDCIEKRQLLKKGSGANDNVAWFKQAKYGMMIHWGLYSLLAGEYRGESSSAYAEWIQSKFQIPNAEYGNLATAFNPLYFDAKKIVALAKQCGMQYLVVTTKHHDGFAMYHSKVDAYNVYDATPFHRDIIGELAEACQKAGLKFGLYYSQDLDWHDPNGGGYKSNDVETAGTTWDNSWDFPDEDQKNFDLCFDNKILPQIKEIMSNYGDIATAWFDVPMTLSEAQSQTIYDTVRELQPNCLINSRLGNGKYDFVSLGDNEIPKNKEDMNKTDVDYNEITGFKPSPLGLYETAGTINDSWGFSYHDQNWKTPRTLYRYKQHLNDFGINYLLNVGLDPLGRVPMMAEENLLAAKALEDEANRGTWSHPQFEK

SEQ ID NO: 41 - DNA, 3522 bp, Artificial Sequence
  SYNTHETIC FUSION PROTEN
atgggcagcagccatcatcaccatcaccatgagctccccggggaattcgaggagaagactgttcaaacaggaaagacagatcagcaggttggtgctaaattggtacaggaaatccgtgaaggaaaacgcggaccactatatgctggttattttaggacatggcatgatcgtgcttcaacaggaatagatggtaaacagcaacatccagaaaatactatggctgaggtcccaaaagaagttgatatcttatttgtttttcatgaccatacagcttcagatagtccattttggtctgaattaaaggacagttatgtccataaattacatcaacagggaacggcacttgttcagacaattggtgttaacgaattaaatggacgtacaggtttatctaaagattatcctgatactcctgaggggaacaaagctttagcagcagccattgtcaaggcatttgtaactgatcgtggtgtcgatggactagatattgatattgagcacgaatttacgaacaaaagaacacctgaagaagatgctcgtgctctaaatgtttttaaagagattgcgcagttaataggtaaaaatggtagtgataaatctaaattgctcatcatggacactaccctaagtgttgaaaataatccaatatttaaagggatagcggaagatcttgattatcttcttagacaatattatggttcacaaggtggagaagctgaagtggatactataaactctgattggaaccaatatcagaattatattgatgctagccagttcatgattggattctccttttttgaagaatctgcgtccaaagggaatttatggtttgatgttaacgaatacgaccctaacaatcctgaaaaagggaaagatattgaaggaacacgtgctaaaaaatatgcagagtggcaacctagtacaggtggtttaaaagcaggtatattctcttatgctattgatcgtgatggagtggctcatgttccttcaacatataaaaataggactagtacaaatttacaacggcatgaagtcgataatatctcacatactgactacaccgtatctcgaaaattaaaaacattgatgaccgaagacaaacgctatgatgtcattgatcaaaaagacattcctgacccagcattaagagaacaaatcattcaacaagttggacagtataaaggcgatttggaacgttataacaagacattggtgcttacaggagataagattcaaaatcttaaaggactagaaaaattaagcaagttacaaaaattagagttgcgccagctatctaacgttaaagaaattactccagaacttttgccggaaagcatgaaaaaagatgctgagcttgttatggtaggcatgactggtttagaaaaactaaaccttagtggtctaaatcgtcaaactttagacggtatagacgtgaatagtattacgcatttgacatcatttgatatttcacataatagtttggacttgtcggaaaagagtgaagaccgtaaactattaatgactttgatggagcaggtttcaaatcatcaaaaaataacggtgaaaaatacggcttttgaaaatcaaaaaccgaaaggttattatcctcagacgtatgataccaaagaaggtcattatgatgttgataatgcagaacatgatattttaactgattttgtttttggaactgttactaaacgtaatacctttattggagacgaagaagcatttgctatctataaagaaggagctgtcgatggtcgacaatatgtgtctaaagactatacttatgaagcttttcgtaaagactataaaggttacaaggttcatttaactgcttctaacctaggagaaacagttacttctaaggtaactgctactactgatgaaacttacttagtagatgtttctgatggggaaaaagttgttcaccacatgaaactcaatataggatctggtgccatcatgatggaaaatctggcaaaaggggctaaagtgattggtacatctggggactttgagcaagcaaagaagattttcgatggtgaaaagtcagatagattcttcacttggggacaaactaactggatagcttttgatctaggagaaattaatcttgcgaaggaatggcgtttatttaatgcagagacaaatactgaaataaagacagatagtagcttaaacgtggctaaaggacgtcttcagattttaaaagatacaactattgatttagaaaaaatggacataaaaaatcgtaaagagtatctgtcgaatgatgaaaattggactgatgttgctcagatggatgatgcaaaagcgatatttaatagtaaattatccaatgttttatctcggtattggcggttttgtgtagatggtggagctagctcttattaccctcaatataccgaacttcaaatcctcggacaacgtttatcaaatgatgtcgctaatacgctgaaggatgcgatcgctcatatgaacgacaacgtggcgtggttcaagcaggcgaaatatggcatgatgattcactggggtctgtacagcctgctggcgggcgagtatcgtggtgaaagcagcagcgcgtacgcggagtggatccagagcaagtttcaaattccgaacgcggaatacggcaacctggcgaccgcgttcaacccgctgtattttgatgcgaagaaaatcgttgcgctggcgaaacagtgcggcatgcaatacctggtggttaccaccaagcaccacgacggtttcgcgatgtatcacagcaaagtggacgcgtacaacgtttatgatgcgaccccgtttcaccgtgatatcattggcgagctggcggaagcgtgccagaaggcgggtctgaaattcggtctgtactatagccaagacctggattggcacgacccgaacggtggcggttataagagcaacgatgtggagaccgcgggtaccacctgggacaacagctgggatttcccggacgaagatcagaaaaacttcgacctgtgctttgataacaagatcctgccgcaaatcaaagagattatgagcaactacggtgacattgcgaccgcgtggtttgatgtgccgatgaccctgagcgaggcgcagagccaaaccatctatgacaccgttcgtgaactgcaaccgaactgcctgattaacagccgtctgggcaacggcaagtacgacttcgtgagcctgggcgataacgagatcccgaagaacaaagaagatatgaacaagaccgacgttgattacaacgagattaccggcttcaaaccgagcccgctgggcctgtatgaaaccgcgggtaccatcaacgacagctggggttttagctaccacgatcagaactggaagaccccgcgtaccctgtaccgttataaacaacacctgaacgactttggtattaactacctgctgaacgtgggcctggatccgctgggtcgtgttccgatgatggcggaggaaaacctgctggcggcgaaagcgctggaggacgaagcgaaccgtgaattctaa

SEQ ID NO: 42 - protein, 1173 aa, Artificial Sequence
  SYNTHETIC FUSION PROTEN
MGSSHHHHHHELPGEFEEKTVQTGKTDQQVGAKLVQEIREGKRGPLYAGYFRTWHDRASTGIDGKQQHPENTMAEVPKEVDILFVFHDHTASDSPFWSELKDSYVHKLHQQGTALVQTIGVNELNGRTGLSKDYPDTPEGNKALAAAIVKAFVTDRGVDGLDIDIEHEFTNKRTPEEDARALNVFKEIAQLIGKNGSDKSKLLIMDTTLSVENNPIFKGIAEDLDYLLRQYYGSQGGEAEVDTINSDWNQYQNYIDASQFMIGFSFFEESASKGNLWFDVNEYDPNNPEKGKDIEGTRAKKYAEWQPSTGGLKAGIFSYAIDRDGVAHVPSTYKNRTSTNLQRHEVDNISHTDYTVSRKLKTLMTEDKRYDVIDQKDIPDPALREQIIQQVGQYKGDLERYNKTLVLTGDKIQNLKGLEKLSKLQKLELRQLSNVKEITPELLPESMKKDAELVMVGMTGLEKLNLSGLNRQTLDGIDVNSITHLTSFDISHNSLDLSEKSEDRKLLMTLMEQVSNHQKITVKNTAFENQKPKGYYPQTYDTKEGHYDVDNAEHDILTDFVFGTVTKRNTFIGDEEAFAIYKEGAVDGRQYVSKDYTYEAFRKDYKGYKVHLTASNLGETVTSKVTATTDETYLVDVSDGEKVVHHMKLNIGSGAIMMENLAKGAKVIGTSGDFEQAKKIFDGEKSDRFFTWGQTNWIAFDLGEINLAKEWRLFNAETNTEIKTDSSLNVAKGRLQILKDTTIDLEKMDIKNRKEYLSNDENWTDVAQMDDAKAIFNSKLSNVLSRYWRFCVDGGASSYYPQYTELQILGQRLSNDVANTLKDAIAHMNDNVAWFKQAKYGMMIHWGLYSLLAGEYRGESSSAYAEWIQSKFQIPNAEYGNLATAFNPLYFDAKKIVALAKQCGMQYLVVTTKHHDGFAMYHSKVDAYNVYDATPFHRDIIGELAEACQKAGLKFGLYYSQDLDWHDPNGGGYKSNDVETAGTTWDNSWDFPDEDQKNFDLCFDNKILPQIKEIMSNYGDIATAWFDVPMTLSEAQSQTIYDTVRELQPNCLINSRLGNGKYDFVSLGDNEIPKNKEDMNKTDVDYNEITGFKPSPLGLYETAGTINDSWGFSYHDQNWKTPRTLYRYKQHLNDFGINYLLNVGLDPLGRVPMMAEENLLAAKALEDEANREF

SEQ ID NO: 43 - DNA, 3522 bp, Artificial Sequence
  SYNTHETIC FUSION PROTEN
atgggcagcagccatcatcaccatcaccatgagctccccggggaattcgaggagaagactgttcaaacaggaaagacagatcagcaggttggtgctaaattggtacaggaaatccgtgaaggaaaacgcggaccactatatgctggttattttaggacatggcatgatcgtgcttcaacaggaatagatggtaaacagcaacatccagaaaatactatggctgaggtcccaaaagaagttgatatcttatttgtttttcatgaccatacagcttcagatagtccattttggtctgaattaaaggacagttatgtccataaattacatcaacagggaacggcacttgttcaggaaattggtgttaacgaattaaatggacgtacaggtttatctaaagattatcctgatactcctgaggggaacaaagctttagcagcagccattgtcaaggcatttgtaactgatcgtggtgtcgatggactagatattgatattgagcacgaatttacgaacaaaagaacacctgaagaagatgctcgtgctctaaatgtttttaaagagattgcgcagttaataggtaaaaatggtagtgataaatctaaattgctcatcatggacactaccctaagtgttgaaaataatccaatatttaaagggatagcggaagatcttgattatcttcttagacaatattatggttcacaaggtggagaagctgaagtggatactataaactctgattggaaccaatatcagaattatattgatgctagccagttcatgattggattctccttttttgaagaatctgcgtccaaagggaatttatggtttgatgttaacgaatacgaccctaacaatcctgaaaaagggaaagatattgaaggaacacgtgctaaaaaatatgcagagtggcaacctagtacaggtggtttaaaagcaggtatattctcttatgctattgatcgtgatggagtggctcatgttccttcaacatataaaaataggactagtacaaatttacaacggcatgaagtcgataatatctcacatactgactacaccgtatctcgaaaattaaaaacattgatgaccgaagacaaacgctatgatgtcattgatcaaaaagacattcctgacccagcattaagagaacaaatcattcaacaagttggacagtataaaggcgatttggaacgttataacaagacattggtgcttacaggagataagattcaaaatcttaaaggactagaaaaattaagcaagttacaaaaattagagttgcgccagctatctaacgttaaagaaattactccagaacttttgccggaaagcatgaaaaaagatgctgagcttgttatggtaggcatgactggtttagaaaaactaaaccttagtggtctaaatcgtcaaactttagacggtatagacgtgaatagtattacgcatttgacatcatttgatatttcacataatagtttggacttgtcggaaaagagtgaagaccgtaaactattaatgactttgatggagcaggtttcaaatcatcaaaaaataacggtgaaaaatacggcttttgaaaatcaaaaaccgaaaggttattatcctcagacgtatgataccaaagaaggtcattatgatgttgataatgcagaacatgatattttaactgattttgtttttggaactgttactaaacgtaatacctttattggagacgaagaagcatttgctatctataaagaaggagctgtcgatggtcgacaatatgtgtctaaagactatacttatgaagcttttcgtaaagactataaaggttacaaggttcatttaactgcttctaacctaggagaaacagttacttctaaggtaactgctactactgatgaaacttacttagtagatgtttctgatggggaaaaagttgttcaccacatgaaactcaatataggatctggtgccatcatgatggaaaatctggcaaaaggggctaaagtgattggtacatctggggactttgagcaagcaaagaagattttcgatggtgaaaagtcagatagattcttcacttggggacaaactaactggatagcttttgatctaggagaaattaatcttgcgaaggaatggcgtttatttaatgcagagacaaatactgaaataaagacagatagtagcttaaacgtggctaaaggacgtcttcagattttaaaagatacaactattgatttagaaaaaatggacataaaaaatcgtaaagagtatctgtcgaatgatgaaaattggactgatgttgctcagatggatgatgcaaaagcgatatttaatagtaaattatccaatgttttatctcggtattggcggttttgtgtagatggtggagctagctcttattaccctcaatataccgaacttcaaatcctcggacaacgtttatcaaatgatgtcgctaatacgctgaaggatgcgatcgctcatatgaacgacaacgtggcgtggttcaagcaggcgaaatatggcatgatgattcactggggtctgtacagcctgctggcgggcgagtatcgtggtgaaagcagcagcgcgtacgcggagtggatccagagcaagtttcaaattccgaacgcggaatacggcaacctggcgaccgcgttcaacccgctgtattttgatgcgaagaaaatcgttgcgctggcgaaacagtgcggcatgcaatacctggtggttaccaccaagcaccacgacggtttcgcgatgtatcacagcaaagtggacgcgtacaacgtttatgatgcgaccccgtttcaccgtgatatcattggcgagctggcggaagcgtgccagaaggcgggtctgaaattcggtctgtactatagccaagacctggattggcacgacccgaacggtggcggttataagagcaacgatgtggagaccgcgggtaccacctgggacaacagctgggatttcccggacgaagatcagaaaaacttcgacctgtgctttgataacaagatcctgccgcaaatcaaagagattatgagcaactacggtgacattgcgaccgcgtggtttgatgtgccgatgaccctgagcgaggcgcagagccaaaccatctatgacaccgttcgtgaactgcaaccgaactgcctgattaacagccgtctgggcaacggcaagtacgacttcgtgagcctgggcgataacgagatcccgaagaacaaagaagatatgaacaagaccgacgttgattacaacgagattaccggcttcaaaccgagcccgctgggcctgtatgaaaccgcgggtaccatcaacgacagctggggttttagctaccacgatcagaactggaagaccccgcgtaccctgtaccgttataaacaacacctgaacgactttggtattaactacctgctgaacgtgggcctggatccgctgggtcgtgttccgatgatggcggaggaaaacctgctggcggcgaaagcgctggaggacgaagcgaaccgtgaattctaa

SEQ ID NO: 44 - protein, 1173 aa, Artificial Sequence
  SYNTHETIC FUSION PROTEN
MGSSHHHHHHELPGEFEEKTVQTGKTDQQVGAKLVQEIREGKRGPLYAGYFRTWHDRASTGIDGKQQHPENTMAEVPKEVDILFVFHDHTASDSPFWSELKDSYVHKLHQQGTALVQEIGVNELNGRTGLSKDYPDTPEGNKALAAAIVKAFVTDRGVDGLDIDIEHEFTNKRTPEEDARALNVFKEIAQLIGKNGSDKSKLLIMDTTLSVENNPIFKGIAEDLDYLLRQYYGSQGGEAEVDTINSDWNQYQNYIDASQFMIGFSFFEESASKGNLWFDVNEYDPNNPEKGKDIEGTRAKKYAEWQPSTGGLKAGIFSYAIDRDGVAHVPSTYKNRTSTNLQRHEVDNISHTDYTVSRKLKTLMTEDKRYDVIDQKDIPDPALREQIIQQVGQYKGDLERYNKTLVLTGDKIQNLKGLEKLSKLQKLELRQLSNVKEITPELLPESMKKDAELVMVGMTGLEKLNLSGLNRQTLDGIDVNSITHLTSFDISHNSLDLSEKSEDRKLLMTLMEQVSNHQKITVKNTAFENQKPKGYYPQTYDTKEGHYDVDNAEHDILTDFVFGTVTKRNTFIGDEEAFAIYKEGAVDGRQYVSKDYTYEAFRKDYKGYKVHLTASNLGETVTSKVTATTDETYLVDVSDGEKVVHHMKLNIGSGAIMMENLAKGAKVIGTSGDFEQAKKIFDGEKSDRFFTWGQTNWIAFDLGEINLAKEWRLFNAETNTEIKTDSSLNVAKGRLQILKDTTIDLEKMDIKNRKEYLSNDENWTDVAQMDDAKAIFNSKLSNVLSRYWRFCVDGGASSYYPQYTELQILGQRLSNDVANTLKDAIAHMNDNVAWFKQAKYGMMIHWGLYSLLAGEYRGESSSAYAEWIQSKFQIPNAEYGNLATAFNPLYFDAKKIVALAKQCGMQYLVVTTKHHDGFAMYHSKVDAYNVYDATPFHRDIIGELAEACQKAGLKFGLYYSQDLDWHDPNGGGYKSNDVETAGTTWDNSWDFPDEDQKNFDLCFDNKILPQIKEIMSNYGDIATAWFDVPMTLSEAQSQTIYDTVRELQPNCLINSRLGNGKYDFVSLGDNEIPKNKEDMNKTDVDYNEITGFKPSPLGLYETAGTINDSWGFSYHDQNWKTPRTLYRYKQHLNDFGINYLLNVGLDPLGRVPMMAEENLLAAKALEDEANREF

SEQ ID NO: 45 - DNA, 3522 bp, Artificial Sequence
  SYNTHETIC FUSION PROTEN
atgggcagcagccatcatcaccatcaccatgagctccccggggaattcgaggagaagactgttcaaacaggaaagacagatcagcaggttggtgctaaattggtacaggaaatccgtgaaggaaaacgcggaccactatatgctggttattttaggacatggcatgatcgtgcttcaacaggaatagatggtaaacagcaacatccagaaaatactatggctgaggtcccaaaagaagttgatatcttatttgtttttcatgaccatacagcttcagatagtccattttggtctgaattaaaggacagttatgtccataaattacatcaacagggaacggcacttgttcagcagattggtgttaacgaattaaatggacgtacaggtttatctaaagattatcctgatactcctgaggggaacaaagctttagcagcagccattgtcaaggcatttgtaactgatcgtggtgtcgatggactagatattgatattgagcacgaatttacgaacaaaagaacacctgaagaagatgctcgtgctctaaatgtttttaaagagattgcgcagttaataggtaaaaatggtagtgataaatctaaattgctcatcatggacactaccctaagtgttgaaaataatccaatatttaaagggatagcggaagatcttgattatcttcttagacaatattatggttcacaaggtggagaagctgaagtggatactataaactctgattggaaccaatatcagaattatattgatgctagccagttcatgattggattctccttttttgaagaatctgcgtccaaagggaatttatggtttgatgttaacgaatacgaccctaacaatcctgaaaaagggaaagatattgaaggaacacgtgctaaaaaatatgcagagtggcaacctagtacaggtggtttaaaagcaggtatattctcttatgctattgatcgtgatggagtggctcatgttccttcaacatataaaaataggactagtacaaatttacaacggcatgaagtcgataatatctcacatactgactacaccgtatctcgaaaattaaaaacattgatgaccgaagacaaacgctatgatgtcattgatcaaaaagacattcctgacccagcattaagagaacaaatcattcaacaagttggacagtataaaggcgatttggaacgttataacaagacattggtgcttacaggagataagattcaaaatcttaaaggactagaaaaattaagcaagttacaaaaattagagttgcgccagctatctaacgttaaagaaattactccagaacttttgccggaaagcatgaaaaaagatgctgagcttgttatggtaggcatgactggtttagaaaaactaaaccttagtggtctaaatcgtcaaactttagacggtatagacgtgaatagtattacgcatttgacatcatttgatatttcacataatagtttggacttgtcggaaaagagtgaagaccgtaaactattaatgactttgatggagcaggtttcaaatcatcaaaaaataacggtgaaaaatacggcttttgaaaatcaaaaaccgaaaggttattatcctcagacgtatgataccaaagaaggtcattatgatgttgataatgcagaacatgatattttaactgattttgtttttggaactgttactaaacgtaatacctttattggagacgaagaagcatttgctatctataaagaaggagctgtcgatggtcgacaatatgtgtctaaagactatacttatgaagcttttcgtaaagactataaaggttacaaggttcatttaactgcttctaacctaggagaaacagttacttctaaggtaactgctactactgatgaaacttacttagtagatgtttctgatggggaaaaagttgttcaccacatgaaactcaatataggatctggtgccatcatgatggaaaatctggcaaaaggggctaaagtgattggtacatctggggactttgagcaagcaaagaagattttcgatggtgaaaagtcagatagattcttcacttggggacaaactaactggatagcttttgatctaggagaaattaatcttgcgaaggaatggcgtttatttaatgcagagacaaatactgaaataaagacagatagtagcttaaacgtggctaaaggacgtcttcagattttaaaagatacaactattgatttagaaaaaatggacataaaaaatcgtaaagagtatctgtcgaatgatgaaaattggactgatgttgctcagatggatgatgcaaaagcgatatttaatagtaaattatccaatgttttatctcggtattggcggttttgtgtagatggtggagctagctcttattaccctcaatataccgaacttcaaatcctcggacaacgtttatcaaatgatgtcgctaatacgctgaaggatgcgatcgctcatatgaacgacaacgtggcgtggttcaagcaggcgaaatatggcatgatgattcactggggtctgtacagcctgctggcgggcgagtatcgtggtgaaagcagcagcgcgtacgcggagtggatccagagcaagtttcaaattccgaacgcggaatacggcaacctggcgaccgcgttcaacccgctgtattttgatgcgaagaaaatcgttgcgctggcgaaacagtgcggcatgcaatacctggtggttaccaccaagcaccacgacggtttcgcgatgtatcacagcaaagtggacgcgtacaacgtttatgatgcgaccccgtttcaccgtgatatcattggcgagctggcggaagcgtgccagaaggcgggtctgaaattcggtctgtactatagccaagacctggattggcacgacccgaacggtggcggttataagagcaacgatgtggagaccgcgggtaccacctgggacaacagctgggatttcccggacgaagatcagaaaaacttcgacctgtgctttgataacaagatcctgccgcaaatcaaagagattatgagcaactacggtgacattgcgaccgcgtggtttgatgtgccgatgaccctgagcgaggcgcagagccaaaccatctatgacaccgttcgtgaactgcaaccgaactgcctgattaacagccgtctgggcaacggcaagtacgacttcgtgagcctgggcgataacgagatcccgaagaacaaagaagatatgaacaagaccgacgttgattacaacgagattaccggcttcaaaccgagcccgctgggcctgtatgaaaccgcgggtaccatcaacgacagctggggttttagctaccacgatcagaactggaagaccccgcgtaccctgtaccgttataaacaacacctgaacgactttggtattaactacctgctgaacgtgggcctggatccgctgggtcgtgttccgatgatggcggaggaaaacctgctggcggcgaaagcgctggaggacgaagcgaaccgtgaattctaa

SEQ ID NO: 46 - protein, 1173 aa, Artificial Sequence
  SYNTHETIC FUSION PROTEN
MGSSHHHHHHELPGEFEEKTVQTGKTDQQVGAKLVQEIREGKRGPLYAGYFRTWHDRASTGIDGKQQHPENTMAEVPKEVDILFVFHDHTASDSPFWSELKDSYVHKLHQQGTALVQQIGVNELNGRTGLSKDYPDTPEGNKALAAAIVKAFVTDRGVDGLDIDIEHEFTNKRTPEEDARALNVFKEIAQLIGKNGSDKSKLLIMDTTLSVENNPIFKGIAEDLDYLLRQYYGSQGGEAEVDTINSDWNQYQNYIDASQFMIGFSFFEESASKGNLWFDVNEYDPNNPEKGKDIEGTRAKKYAEWQPSTGGLKAGIFSYAIDRDGVAHVPSTYKNRTSTNLQRHEVDNISHTDYTVSRKLKTLMTEDKRYDVIDQKDIPDPALREQIIQQVGQYKGDLERYNKTLVLTGDKIQNLKGLEKLSKLQKLELRQLSNVKEITPELLPESMKKDAELVMVGMTGLEKLNLSGLNRQTLDGIDVNSITHLTSFDISHNSLDLSEKSEDRKLLMTLMEQVSNHQKITVKNTAFENQKPKGYYPQTYDTKEGHYDVDNAEHDILTDFVFGTVTKRNTFIGDEEAFAIYKEGAVDGRQYVSKDYTYEAFRKDYKGYKVHLTASNLGETVTSKVTATTDETYLVDVSDGEKVVHHMKLNIGSGAIMMENLAKGAKVIGTSGDFEQAKKIFDGEKSDRFFTWGQTNWIAFDLGEINLAKEWRLFNAETNTEIKTDSSLNVAKGRLQILKDTTIDLEKMDIKNRKEYLSNDENWTDVAQMDDAKAIFNSKLSNVLSRYWRFCVDGGASSYYPQYTELQILGQRLSNDVANTLKDAIAHMNDNVAWFKQAKYGMMIHWGLYSLLAGEYRGESSSAYAEWIQSKFQIPNAEYGNLATAFNPLYFDAKKIVALAKQCGMQYLVVTTKHHDGFAMYHSKVDAYNVYDATPFHRDIIGELAEACQKAGLKFGLYYSQDLDWHDPNGGGYKSNDVETAGTTWDNSWDFPDEDQKNFDLCFDNKILPQIKEIMSNYGDIATAWFDVPMTLSEAQSQTIYDTVRELQPNCLINSRLGNGKYDFVSLGDNEIPKNKEDMNKTDVDYNEITGFKPSPLGLYETAGTINDSWGFSYHDQNWKTPRTLYRYKQHLNDFGINYLLNVGLDPLGRVPMMAEENLLAAKALEDEANREF

SEQ ID NO: 47 - DNA, 3522 bp, Artificial Sequence
  SYNTHETIC FUSION PROTEN
atgggcagcagccatcatcaccatcaccatgagctccccggggaattcgaggagaagactgttcaaacaggaaagacagatcagcaggttggtgctaaattggtacaggaaatccgtgaaggaaaacgcggaccactatatgctggttattttaggacatggcatgatcgtgcttcaacaggaatagatggtaaacagcaacatccagaaaatactatggctgaggtcccaaaagaagttgatatcttatttgtttttcatgaccatacagcttcagatagtccattttggtctgaattaaaggacagttatgtccataaattacatcaacagggaacggcacttgttcagcggattggtgttaacgaattaaatggacgtacaggtttatctaaagattatcctgatactcctgaggggaacaaagctttagcagcagccattgtcaaggcatttgtaactgatcgtggtgtcgatggactagatattgatattgagcacgaatttacgaacaaaagaacacctgaagaagatgctcgtgctctaaatgtttttaaagagattgcgcagttaataggtaaaaatggtagtgataaatctaaattgctcatcatggacactaccctaagtgttgaaaataatccaatatttaaagggatagcggaagatcttgattatcttcttagacaatattatggttcacaaggtggagaagctgaagtggatactataaactctgattggaaccaatatcagaattatattgatgctagccagttcatgattggattctccttttttgaagaatctgcgtccaaagggaatttatggtttgatgttaacgaatacgaccctaacaatcctgaaaaagggaaagatattgaaggaacacgtgctaaaaaatatgcagagtggcaacctagtacaggtggtttaaaagcaggtatattctcttatgctattgatcgtgatggagtggctcatgttccttcaacatataaaaataggactagtacaaatttacaacggcatgaagtcgataatatctcacatactgactacaccgtatctcgaaaattaaaaacattgatgaccgaagacaaacgctatgatgtcattgatcaaaaagacattcctgacccagcattaagagaacaaatcattcaacaagttggacagtataaaggcgatttggaacgttataacaagacattggtgcttacaggagataagattcaaaatcttaaaggactagaaaaattaagcaagttacaaaaattagagttgcgccagctatctaacgttaaagaaattactccagaacttttgccggaaagcatgaaaaaagatgctgagcttgttatggtaggcatgactggtttagaaaaactaaaccttagtggtctaaatcgtcaaactttagacggtatagacgtgaatagtattacgcatttgacatcatttgatatttcacataatagtttggacttgtcggaaaagagtgaagaccgtaaactattaatgactttgatggagcaggtttcaaatcatcaaaaaataacggtgaaaaatacggcttttgaaaatcaaaaaccgaaaggttattatcctcagacgtatgataccaaagaaggtcattatgatgttgataatgcagaacatgatattttaactgattttgtttttggaactgttactaaacgtaatacctttattggagacgaagaagcatttgctatctataaagaaggagctgtcgatggtcgacaatatgtgtctaaagactatacttatgaagcttttcgtaaagactataaaggttacaaggttcatttaactgcttctaacctaggagaaacagttacttctaaggtaactgctactactgatgaaacttacttagtagatgtttctgatggggaaaaagttgttcaccacatgaaactcaatataggatctggtgccatcatgatggaaaatctggcaaaaggggctaaagtgattggtacatctggggactttgagcaagcaaagaagattttcgatggtgaaaagtcagatagattcttcacttggggacaaactaactggatagcttttgatctaggagaaattaatcttgcgaaggaatggcgtttatttaatgcagagacaaatactgaaataaagacagatagtagcttaaacgtggctaaaggacgtcttcagattttaaaagatacaactattgatttagaaaaaatggacataaaaaatcgtaaagagtatctgtcgaatgatgaaaattggactgatgttgctcagatggatgatgcaaaagcgatatttaatagtaaattatccaatgttttatctcggtattggcggttttgtgtagatggtggagctagctcttattaccctcaatataccgaacttcaaatcctcggacaacgtttatcaaatgatgtcgctaatacgctgaaggatgcgatcgctcatatgaacgacaacgtggcgtggttcaagcaggcgaaatatggcatgatgattcactggggtctgtacagcctgctggcgggcgagtatcgtggtgaaagcagcagcgcgtacgcggagtggatccagagcaagtttcaaattccgaacgcggaatacggcaacctggcgaccgcgttcaacccgctgtattttgatgcgaagaaaatcgttgcgctggcgaaacagtgcggcatgcaatacctggtggttaccaccaagcaccacgacggtttcgcgatgtatcacagcaaagtggacgcgtacaacgtttatgatgcgaccccgtttcaccgtgatatcattggcgagctggcggaagcgtgccagaaggcgggtctgaaattcggtctgtactatagccaagacctggattggcacgacccgaacggtggcggttataagagcaacgatgtggagaccgcgggtaccacctgggacaacagctgggatttcccggacgaagatcagaaaaacttcgacctgtgctttgataacaagatcctgccgcaaatcaaagagattatgagcaactacggtgacattgcgaccgcgtggtttgatgtgccgatgaccctgagcgaggcgcagagccaaaccatctatgacaccgttcgtgaactgcaaccgaactgcctgattaacagccgtctgggcaacggcaagtacgacttcgtgagcctgggcgataacgagatcccgaagaacaaagaagatatgaacaagaccgacgttgattacaacgagattaccggcttcaaaccgagcccgctgggcctgtatgaaaccgcgggtaccatcaacgacagctggggttttagctaccacgatcagaactggaagaccccgcgtaccctgtaccgttataaacaacacctgaacgactttggtattaactacctgctgaacgtgggcctggatccgctgggtcgtgttccgatgatggcggaggaaaacctgctggcggcgaaagcgctggaggacgaagcgaaccgtgaattctaa

SEQ ID NO: 48 - protein, 1173 aa, Artificial Sequence
  SYNTHETIC FUSION PROTEN
MGSSHHHHHHELPGEFEEKTVQTGKTDQQVGAKLVQEIREGKRGPLYAGYFRTWHDRASTGIDGKQQHPENTMAEVPKEVDILFVFHDHTASDSPFWSELKDSYVHKLHQQGTALVQRIGVNELNGRTGLSKDYPDTPEGNKALAAAIVKAFVTDRGVDGLDIDIEHEFTNKRTPEEDARALNVFKEIAQLIGKNGSDKSKLLIMDTTLSVENNPIFKGIAEDLDYLLRQYYGSQGGEAEVDTINSDWNQYQNYIDASQFMIGFSFFEESASKGNLWFDVNEYDPNNPEKGKDIEGTRAKKYAEWQPSTGGLKAGIFSYAIDRDGVAHVPSTYKNRTSTNLQRHEVDNISHTDYTVSRKLKTLMTEDKRYDVIDQKDIPDPALREQIIQQVGQYKGDLERYNKTLVLTGDKIQNLKGLEKLSKLQKLELRQLSNVKEITPELLPESMKKDAELVMVGMTGLEKLNLSGLNRQTLDGIDVNSITHLTSFDISHNSLDLSEKSEDRKLLMTLMEQVSNHQKITVKNTAFENQKPKGYYPQTYDTKEGHYDVDNAEHDILTDFVFGTVTKRNTFIGDEEAFAIYKEGAVDGRQYVSKDYTYEAFRKDYKGYKVHLTASNLGETVTSKVTATTDETYLVDVSDGEKVVHHMKLNIGSGAIMMENLAKGAKVIGTSGDFEQAKKIFDGEKSDRFFTWGQTNWIAFDLGEINLAKEWRLFNAETNTEIKTDSSLNVAKGRLQILKDTTIDLEKMDIKNRKEYLSNDENWTDVAQMDDAKAIFNSKLSNVLSRYWRFCVDGGASSYYPQYTELQILGQRLSNDVANTLKDAIAHMNDNVAWFKQAKYGMMIHWGLYSLLAGEYRGESSSAYAEWIQSKFQIPNAEYGNLATAFNPLYFDAKKIVALAKQCGMQYLVVTTKHHDGFAMYHSKVDAYNVYDATPFHRDIIGELAEACQKAGLKFGLYYSQDLDWHDPNGGGYKSNDVETAGTTWDNSWDFPDEDQKNFDLCFDNKILPQIKEIMSNYGDIATAWFDVPMTLSEAQSQTIYDTVRELQPNCLINSRLGNGKYDFVSLGDNEIPKNKEDMNKTDVDYNEITGFKPSPLGLYETAGTINDSWGFSYHDQNWKTPRTLYRYKQHLNDFGINYLLNVGLDPLGRVPMMAEENLLAAKALEDEANREF

SEQ ID NO: 49 - DNA, 3522 bp, Artificial Sequence
  SYNTHETIC FUSION PROTEN
atgggcagcagccatcatcaccatcaccatgagctccccggggaattcgaggagaagactgttcaaacaggaaagacagatcagcaggttggtgctaaattggtacaggaaatccgtgaaggaaaacgcggaccactatatgctggttattttaggacatggcatgatcgtgcttcaacaggaatagatggtaaacagcaacatccagaaaatactatggctgaggtcccaaaagaagttgatatcttatttgtttttcatgaccatacagcttcagatagtccattttggtctgaattaaaggacagttatgtccataaattacatcaacagggaacggcacttgttcagatgattggtgttaacgaattaaatggacgtacaggtttatctaaagattatcctgatactcctgaggggaacaaagctttagcagcagccattgtcaaggcatttgtaactgatcgtggtgtcgatggactagatattgatattgagcacgaatttacgaacaaaagaacacctgaagaagatgctcgtgctctaaatgtttttaaagagattgcgcagttaataggtaaaaatggtagtgataaatctaaattgctcatcatggacactaccctaagtgttgaaaataatccaatatttaaagggatagcggaagatcttgattatcttcttagacaatattatggttcacaaggtggagaagctgaagtggatactataaactctgattggaaccaatatcagaattatattgatgctagccagttcatgattggattctccttttttgaagaatctgcgtccaaagggaatttatggtttgatgttaacgaatacgaccctaacaatcctgaaaaagggaaagatattgaaggaacacgtgctaaaaaatatgcagagtggcaacctagtacaggtggtttaaaagcaggtatattctcttatgctattgatcgtgatggagtggctcatgttccttcaacatataaaaataggactagtacaaatttacaacggcatgaagtcgataatatctcacatactgactacaccgtatctcgaaaattaaaaacattgatgaccgaagacaaacgctatgatgtcattgatcaaaaagacattcctgacccagcattaagagaacaaatcattcaacaagttggacagtataaaggcgatttggaacgttataacaagacattggtgcttacaggagataagattcaaaatcttaaaggactagaaaaattaagcaagttacaaaaattagagttgcgccagctatctaacgttaaagaaattactccagaacttttgccggaaagcatgaaaaaagatgctgagcttgttatggtaggcatgactggtttagaaaaactaaaccttagtggtctaaatcgtcaaactttagacggtatagacgtgaatagtattacgcatttgacatcatttgatatttcacataatagtttggacttgtcggaaaagagtgaagaccgtaaactattaatgactttgatggagcaggtttcaaatcatcaaaaaataacggtgaaaaatacggcttttgaaaatcaaaaaccgaaaggttattatcctcagacgtatgataccaaagaaggtcattatgatgttgataatgcagaacatgatattttaactgattttgtttttggaactgttactaaacgtaatacctttattggagacgaagaagcatttgctatctataaagaaggagctgtcgatggtcgacaatatgtgtctaaagactatacttatgaagcttttcgtaaagactataaaggttacaaggttcatttaactgcttctaacctaggagaaacagttacttctaaggtaactgctactactgatgaaacttacttagtagatgtttctgatggggaaaaagttgttcaccacatgaaactcaatataggatctggtgccatcatgatggaaaatctggcaaaaggggctaaagtgattggtacatctggggactttgagcaagcaaagaagattttcgatggtgaaaagtcagatagattcttcacttggggacaaactaactggatagcttttgatctaggagaaattaatcttgcgaaggaatggcgtttatttaatgcagagacaaatactgaaataaagacagatagtagcttaaacgtggctaaaggacgtcttcagattttaaaagatacaactattgatttagaaaaaatggacataaaaaatcgtaaagagtatctgtcgaatgatgaaaattggactgatgttgctcagatggatgatgcaaaagcgatatttaatagtaaattatccaatgttttatctcggtattggcggttttgtgtagatggtggagctagctcttattaccctcaatataccgaacttcaaatcctcggacaacgtttatcaaatgatgtcgctaatacgctgaaggatgcgatcgctcatatgaacgacaacgtggcgtggttcaagcaggcgaaatatggcatgatgattcactggggtctgtacagcctgctggcgggcgagtatcgtggtgaaagcagcagcgcgtacgcggagtggatccagagcaagtttcaaattccgaacgcggaatacggcaacctggcgaccgcgttcaacccgctgtattttgatgcgaagaaaatcgttgcgctggcgaaacagtgcggcatgcaatacctggtggttaccaccaagcaccacgacggtttcgcgatgtatcacagcaaagtggacgcgtacaacgtttatgatgcgaccccgtttcaccgtgatatcattggcgagctggcggaagcgtgccagaaggcgggtctgaaattcggtctgtactatagccaagacctggattggcacgacccgaacggtggcggttataagagcaacgatgtggagaccgcgggtaccacctgggacaacagctgggatttcccggacgaagatcagaaaaacttcgacctgtgctttgataacaagatcctgccgcaaatcaaagagattatgagcaactacggtgacattgcgaccgcgtggtttgatgtgccgatgaccctgagcgaggcgcagagccaaaccatctatgacaccgttcgtgaactgcaaccgaactgcctgattaacagccgtctgggcaacggcaagtacgacttcgtgagcctgggcgataacgagatcccgaagaacaaagaagatatgaacaagaccgacgttgattacaacgagattaccggcttcaaaccgagcccgctgggcctgtatgaaaccgcgggtaccatcaacgacagctggggttttagctaccacgatcagaactggaagaccccgcgtaccctgtaccgttataaacaacacctgaacgactttggtattaactacctgctgaacgtgggcctggatccgctgggtcgtgttccgatgatggcggaggaaaacctgctggcggcgaaagcgctggaggacgaagcgaaccgtgaattctaa

SEQ ID NO: 50 - protein, 1173 aa, Artificial Sequence
  SYNTHETIC FUSION PROTEN
MGSSHHHHHHELPGEFEEKTVQTGKTDQQVGAKLVQEIREGKRGPLYAGYFRTWHDRASTGIDGKQQHPENTMAEVPKEVDILFVFHDHTASDSPFWSELKDSYVHKLHQQGTALVQMIGVNELNGRTGLSKDYPDTPEGNKALAAAIVKAFVTDRGVDGLDIDIEHEFTNKRTPEEDARALNVFKEIAQLIGKNGSDKSKLLIMDTTLSVENNPIFKGIAEDLDYLLRQYYGSQGGEAEVDTINSDWNQYQNYIDASQFMIGFSFFEESASKGNLWFDVNEYDPNNPEKGKDIEGTRAKKYAEWQPSTGGLKAGIFSYAIDRDGVAHVPSTYKNRTSTNLQRHEVDNISHTDYTVSRKLKTLMTEDKRYDVIDQKDIPDPALREQIIQQVGQYKGDLERYNKTLVLTGDKIQNLKGLEKLSKLQKLELRQLSNVKEITPELLPESMKKDAELVMVGMTGLEKLNLSGLNRQTLDGIDVNSITHLTSFDISHNSLDLSEKSEDRKLLMTLMEQVSNHQKITVKNTAFENQKPKGYYPQTYDTKEGHYDVDNAEHDILTDFVFGTVTKRNTFIGDEEAFAIYKEGAVDGRQYVSKDYTYEAFRKDYKGYKVHLTASNLGETVTSKVTATTDETYLVDVSDGEKVVHHMKLNIGSGAIMMENLAKGAKVIGTSGDFEQAKKIFDGEKSDRFFTWGQTNWIAFDLGEINLAKEWRLFNAETNTEIKTDSSLNVAKGRLQILKDTTIDLEKMDIKNRKEYLSNDENWTDVAQMDDAKAIFNSKLSNVLSRYWRFCVDGGASSYYPQYTELQILGQRLSNDVANTLKDAIAHMNDNVAWFKQAKYGMMIHWGLYSLLAGEYRGESSSAYAEWIQSKFQIPNAEYGNLATAFNPLYFDAKKIVALAKQCGMQYLVVTTKHHDGFAMYHSKVDAYNVYDATPFHRDIIGELAEACQKAGLKFGLYYSQDLDWHDPNGGGYKSNDVETAGTTWDNSWDFPDEDQKNFDLCFDNKILPQIKEIMSNYGDIATAWFDVPMTLSEAQSQTIYDTVRELQPNCLINSRLGNGKYDFVSLGDNEIPKNKEDMNKTDVDYNEITGFKPSPLGLYETAGTINDSWGFSYHDQNWKTPRTLYRYKQHLNDFGINYLLNVGLDPLGRVPMMAEENLLAAKALEDEANREF

SEQ ID NO: 51 - DNA, 3522 bp, Artificial Sequence
  SYNTHETIC FUSION PROTEN
atgggcagcagccatcatcaccatcaccatgagctccccggggaattcgaggagaagactgttcaaacaggaaagacagatcagcaggttggtgctaaattggtacaggaaatccgtgaaggaaaacgcggaccactatatgctggttattttaggacatggcatgatcgtgcttcaacaggaatagatggtaaacagcaacatccagaaaatactatggctgaggtcccaaaagaagttgatatcttatttgtttttcatgaccatacagcttcagatagtccattttggtctgaattaaaggacagttatgtccataaattacatcaacagggaacggcacttgttcagctgattggtgttaacgaattaaatggacgtacaggtttatctaaagattatcctgatactcctgaggggaacaaagctttagcagcagccattgtcaaggcatttgtaactgatcgtggtgtcgatggactagatattgatattgagcacgaatttacgaacaaaagaacacctgaagaagatgctcgtgctctaaatgtttttaaagagattgcgcagttaataggtaaaaatggtagtgataaatctaaattgctcatcatggacactaccctaagtgttgaaaataatccaatatttaaagggatagcggaagatcttgattatcttcttagacaatattatggttcacaaggtggagaagctgaagtggatactataaactctgattggaaccaatatcagaattatattgatgctagccagttcatgattggattctccttttttgaagaatctgcgtccaaagggaatttatggtttgatgttaacgaatacgaccctaacaatcctgaaaaagggaaagatattgaaggaacacgtgctaaaaaatatgcagagtggcaacctagtacaggtggtttaaaagcaggtatattctcttatgctattgatcgtgatggagtggctcatgttccttcaacatataaaaataggactagtacaaatttacaacggcatgaagtcgataatatctcacatactgactacaccgtatctcgaaaattaaaaacattgatgaccgaagacaaacgctatgatgtcattgatcaaaaagacattcctgacccagcattaagagaacaaatcattcaacaagttggacagtataaaggcgatttggaacgttataacaagacattggtgcttacaggagataagattcaaaatcttaaaggactagaaaaattaagcaagttacaaaaattagagttgcgccagctatctaacgttaaagaaattactccagaacttttgccggaaagcatgaaaaaagatgctgagcttgttatggtaggcatgactggtttagaaaaactaaaccttagtggtctaaatcgtcaaactttagacggtatagacgtgaatagtattacgcatttgacatcatttgatatttcacataatagtttggacttgtcggaaaagagtgaagaccgtaaactattaatgactttgatggagcaggtttcaaatcatcaaaaaataacggtgaaaaatacggcttttgaaaatcaaaaaccgaaaggttattatcctcagacgtatgataccaaagaaggtcattatgatgttgataatgcagaacatgatattttaactgattttgtttttggaactgttactaaacgtaatacctttattggagacgaagaagcatttgctatctataaagaaggagctgtcgatggtcgacaatatgtgtctaaagactatacttatgaagcttttcgtaaagactataaaggttacaaggttcatttaactgcttctaacctaggagaaacagttacttctaaggtaactgctactactgatgaaacttacttagtagatgtttctgatggggaaaaagttgttcaccacatgaaactcaatataggatctggtgccatcatgatggaaaatctggcaaaaggggctaaagtgattggtacatctggggactttgagcaagcaaagaagattttcgatggtgaaaagtcagatagattcttcacttggggacaaactaactggatagcttttgatctaggagaaattaatcttgcgaaggaatggcgtttatttaatgcagagacaaatactgaaataaagacagatagtagcttaaacgtggctaaaggacgtcttcagattttaaaagatacaactattgatttagaaaaaatggacataaaaaatcgtaaagagtatctgtcgaatgatgaaaattggactgatgttgctcagatggatgatgcaaaagcgatatttaatagtaaattatccaatgttttatctcggtattggcggttttgtgtagatggtggagctagctcttattaccctcaatataccgaacttcaaatcctcggacaacgtttatcaaatgatgtcgctaatacgctgaaggatgcgatcgctcatatgaacgacaacgtggcgtggttcaagcaggcgaaatatggcatgatgattcactggggtctgtacagcctgctggcgggcgagtatcgtggtgaaagcagcagcgcgtacgcggagtggatccagagcaagtttcaaattccgaacgcggaatacggcaacctggcgaccgcgttcaacccgctgtattttgatgcgaagaaaatcgttgcgctggcgaaacagtgcggcatgcaatacctggtggttaccaccaagcaccacgacggtttcgcgatgtatcacagcaaagtggacgcgtacaacgtttatgatgcgaccccgtttcaccgtgatatcattggcgagctggcggaagcgtgccagaaggcgggtctgaaattcggtctgtactatagccaagacctggattggcacgacccgaacggtggcggttataagagcaacgatgtggagaccgcgggtaccacctgggacaacagctgggatttcccggacgaagatcagaaaaacttcgacctgtgctttgataacaagatcctgccgcaaatcaaagagattatgagcaactacggtgacattgcgaccgcgtggtttgatgtgccgatgaccctgagcgaggcgcagagccaaaccatctatgacaccgttcgtgaactgcaaccgaactgcctgattaacagccgtctgggcaacggcaagtacgacttcgtgagcctgggcgataacgagatcccgaagaacaaagaagatatgaacaagaccgacgttgattacaacgagattaccggcttcaaaccgagcccgctgggcctgtatgaaaccgcgggtaccatcaacgacagctggggttttagctaccacgatcagaactggaagaccccgcgtaccctgtaccgttataaacaacacctgaacgactttggtattaactacctgctgaacgtgggcctggatccgctgggtcgtgttccgatgatggcggaggaaaacctgctggcggcgaaagcgctggaggacgaagcgaaccgtgaattctaa

SEQ ID NO: 52 - protein, 1173 aa, Artificial Sequence
  SYNTHETIC FUSION PROTEN
MGSSHHHHHHELPGEFEEKTVQTGKTDQQVGAKLVQEIREGKRGPLYAGYFRTWHDRASTGIDGKQQHPENTMAEVPKEVDILFVFHDHTASDSPFWSELKDSYVHKLHQQGTALVQLIGVNELNGRTGLSKDYPDTPEGNKALAAAIVKAFVTDRGVDGLDIDIEHEFTNKRTPEEDARALNVFKEIAQLIGKNGSDKSKLLIMDTTLSVENNPIFKGIAEDLDYLLRQYYGSQGGEAEVDTINSDWNQYQNYIDASQFMIGFSFFEESASKGNLWFDVNEYDPNNPEKGKDIEGTRAKKYAEWQPSTGGLKAGIFSYAIDRDGVAHVPSTYKNRTSTNLQRHEVDNISHTDYTVSRKLKTLMTEDKRYDVIDQKDIPDPALREQIIQQVGQYKGDLERYNKTLVLTGDKIQNLKGLEKLSKLQKLELRQLSNVKEITPELLPESMKKDAELVMVGMTGLEKLNLSGLNRQTLDGIDVNSITHLTSFDISHNSLDLSEKSEDRKLLMTLMEQVSNHQKITVKNTAFENQKPKGYYPQTYDTKEGHYDVDNAEHDILTDFVFGTVTKRNTFIGDEEAFAIYKEGAVDGRQYVSKDYTYEAFRKDYKGYKVHLTASNLGETVTSKVTATTDETYLVDVSDGEKVVHHMKLNIGSGAIMMENLAKGAKVIGTSGDFEQAKKIFDGEKSDRFFTWGQTNWIAFDLGEINLAKEWRLFNAETNTEIKTDSSLNVAKGRLQILKDTTIDLEKMDIKNRKEYLSNDENWTDVAQMDDAKAIFNSKLSNVLSRYWRFCVDGGASSYYPQYTELQILGQRLSNDVANTLKDAIAHMNDNVAWFKQAKYGMMIHWGLYSLLAGEYRGESSSAYAEWIQSKFQIPNAEYGNLATAFNPLYFDAKKIVALAKQCGMQYLVVTTKHHDGFAMYHSKVDAYNVYDATPFHRDIIGELAEACQKAGLKFGLYYSQDLDWHDPNGGGYKSNDVETAGTTWDNSWDFPDEDQKNFDLCFDNKILPQIKEIMSNYGDIATAWFDVPMTLSEAQSQTIYDTVRELQPNCLINSRLGNGKYDFVSLGDNEIPKNKEDMNKTDVDYNEITGFKPSPLGLYETAGTINDSWGFSYHDQNWKTPRTLYRYKQHLNDFGINYLLNVGLDPLGRVPMMAEENLLAAKALEDEANREF

SEQ ID NO: 53 - DNA, 3522 bp, Artificial Sequence
  SYNTHETIC FUSION PROTEN
atgggcagcagccatcatcaccatcaccatgagctccccggggaattcgaggagaagactgttcaaacaggaaagacagatcagcaggttggtgctaaattggtacaggaaatccgtgaaggaaaacgcggaccactatatgctggttattttaggacatggcatgatcgtgcttcaacaggaatagatggtaaacagcaacatccagaaaatactatggctgaggtcccaaaagaagttgatatcttatttgtttttcatgaccatacagcttcagatagtccattttggtctgaattaaaggacagttatgtccataaattacatcaacagggaacggcacttgttcagcacattggtgttaacgaattaaatggacgtacaggtttatctaaagattatcctgatactcctgaggggaacaaagctttagcagcagccattgtcaaggcatttgtaactgatcgtggtgtcgatggactagatattgatattgagcacgaatttacgaacaaaagaacacctgaagaagatgctcgtgctctaaatgtttttaaagagattgcgcagttaataggtaaaaatggtagtgataaatctaaattgctcatcatggacactaccctaagtgttgaaaataatccaatatttaaagggatagcggaagatcttgattatcttcttagacaatattatggttcacaaggtggagaagctgaagtggatactataaactctgattggaaccaatatcagaattatattgatgctagccagttcatgattggattctccttttttgaagaatctgcgtccaaagggaatttatggtttgatgttaacgaatacgaccctaacaatcctgaaaaagggaaagatattgaaggaacacgtgctaaaaaatatgcagagtggcaacctagtacaggtggtttaaaagcaggtatattctcttatgctattgatcgtgatggagtggctcatgttccttcaacatataaaaataggactagtacaaatttacaacggcatgaagtcgataatatctcacatactgactacaccgtatctcgaaaattaaaaacattgatgaccgaagacaaacgctatgatgtcattgatcaaaaagacattcctgacccagcattaagagaacaaatcattcaacaagttggacagtataaaggcgatttggaacgttataacaagacattggtgcttacaggagataagattcaaaatcttaaaggactagaaaaattaagcaagttacaaaaattagagttgcgccagctatctaacgttaaagaaattactccagaacttttgccggaaagcatgaaaaaagatgctgagcttgttatggtaggcatgactggtttagaaaaactaaaccttagtggtctaaatcgtcaaactttagacggtatagacgtgaatagtattacgcatttgacatcatttgatatttcacataatagtttggacttgtcggaaaagagtgaagaccgtaaactattaatgactttgatggagcaggtttcaaatcatcaaaaaataacggtgaaaaatacggcttttgaaaatcaaaaaccgaaaggttattatcctcagacgtatgataccaaagaaggtcattatgatgttgataatgcagaacatgatattttaactgattttgtttttggaactgttactaaacgtaatacctttattggagacgaagaagcatttgctatctataaagaaggagctgtcgatggtcgacaatatgtgtctaaagactatacttatgaagcttttcgtaaagactataaaggttacaaggttcatttaactgcttctaacctaggagaaacagttacttctaaggtaactgctactactgatgaaacttacttagtagatgtttctgatggggaaaaagttgttcaccacatgaaactcaatataggatctggtgccatcatgatggaaaatctggcaaaaggggctaaagtgattggtacatctggggactttgagcaagcaaagaagattttcgatggtgaaaagtcagatagattcttcacttggggacaaactaactggatagcttttgatctaggagaaattaatcttgcgaaggaatggcgtttatttaatgcagagacaaatactgaaataaagacagatagtagcttaaacgtggctaaaggacgtcttcagattttaaaagatacaactattgatttagaaaaaatggacataaaaaatcgtaaagagtatctgtcgaatgatgaaaattggactgatgttgctcagatggatgatgcaaaagcgatatttaatagtaaattatccaatgttttatctcggtattggcggttttgtgtagatggtggagctagctcttattaccctcaatataccgaacttcaaatcctcggacaacgtttatcaaatgatgtcgctaatacgctgaaggatgcgatcgctcatatgaacgacaacgtggcgtggttcaagcaggcgaaatatggcatgatgattcactggggtctgtacagcctgctggcgggcgagtatcgtggtgaaagcagcagcgcgtacgcggagtggatccagagcaagtttcaaattccgaacgcggaatacggcaacctggcgaccgcgttcaacccgctgtattttgatgcgaagaaaatcgttgcgctggcgaaacagtgcggcatgcaatacctggtggttaccaccaagcaccacgacggtttcgcgatgtatcacagcaaagtggacgcgtacaacgtttatgatgcgaccccgtttcaccgtgatatcattggcgagctggcggaagcgtgccagaaggcgggtctgaaattcggtctgtactatagccaagacctggattggcacgacccgaacggtggcggttataagagcaacgatgtggagaccgcgggtaccacctgggacaacagctgggatttcccggacgaagatcagaaaaacttcgacctgtgctttgataacaagatcctgccgcaaatcaaagagattatgagcaactacggtgacattgcgaccgcgtggtttgatgtgccgatgaccctgagcgaggcgcagagccaaaccatctatgacaccgttcgtgaactgcaaccgaactgcctgattaacagccgtctgggcaacggcaagtacgacttcgtgagcctgggcgataacgagatcccgaagaacaaagaagatatgaacaagaccgacgttgattacaacgagattaccggcttcaaaccgagcccgctgggcctgtatgaaaccgcgggtaccatcaacgacagctggggttttagctaccacgatcagaactggaagaccccgcgtaccctgtaccgttataaacaacacctgaacgactttggtattaactacctgctgaacgtgggcctggatccgctgggtcgtgttccgatgatggcggaggaaaacctgctggcggcgaaagcgctggaggacgaagcgaaccgtgaattctaa

SEQ ID NO: 54 - protein, 1173 aa, Artificial Sequence
  SYNTHETIC FUSION PROTEN
MGSSHHHHHHELPGEFEEKTVQTGKTDQQVGAKLVQEIREGKRGPLYAGYFRTWHDRASTGIDGKQQHPENTMAEVPKEVDILFVFHDHTASDSPFWSELKDSYVHKLHQQGTALVQHIGVNELNGRTGLSKDYPDTPEGNKALAAAIVKAFVTDRGVDGLDIDIEHEFTNKRTPEEDARALNVFKEIAQLIGKNGSDKSKLLIMDTTLSVENNPIFKGIAEDLDYLLRQYYGSQGGEAEVDTINSDWNQYQNYIDASQFMIGFSFFEESASKGNLWFDVNEYDPNNPEKGKDIEGTRAKKYAEWQPSTGGLKAGIFSYAIDRDGVAHVPSTYKNRTSTNLQRHEVDNISHTDYTVSRKLKTLMTEDKRYDVIDQKDIPDPALREQIIQQVGQYKGDLERYNKTLVLTGDKIQNLKGLEKLSKLQKLELRQLSNVKEITPELLPESMKKDAELVMVGMTGLEKLNLSGLNRQTLDGIDVNSITHLTSFDISHNSLDLSEKSEDRKLLMTLMEQVSNHQKITVKNTAFENQKPKGYYPQTYDTKEGHYDVDNAEHDILTDFVFGTVTKRNTFIGDEEAFAIYKEGAVDGRQYVSKDYTYEAFRKDYKGYKVHLTASNLGETVTSKVTATTDETYLVDVSDGEKVVHHMKLNIGSGAIMMENLAKGAKVIGTSGDFEQAKKIFDGEKSDRFFTWGQTNWIAFDLGEINLAKEWRLFNAETNTEIKTDSSLNVAKGRLQILKDTTIDLEKMDIKNRKEYLSNDENWTDVAQMDDAKAIFNSKLSNVLSRYWRFCVDGGASSYYPQYTELQILGQRLSNDVANTLKDAIAHMNDNVAWFKQAKYGMMIHWGLYSLLAGEYRGESSSAYAEWIQSKFQIPNAEYGNLATAFNPLYFDAKKIVALAKQCGMQYLVVTTKHHDGFAMYHSKVDAYNVYDATPFHRDIIGELAEACQKAGLKFGLYYSQDLDWHDPNGGGYKSNDVETAGTTWDNSWDFPDEDQKNFDLCFDNKILPQIKEIMSNYGDIATAWFDVPMTLSEAQSQTIYDTVRELQPNCLINSRLGNGKYDFVSLGDNEIPKNKEDMNKTDVDYNEITGFKPSPLGLYETAGTINDSWGFSYHDQNWKTPRTLYRYKQHLNDFGINYLLNVGLDPLGRVPMMAEENLLAAKALEDEANREF

SEQ ID NO: 55 - DNA, 3522 bp, Artificial Sequence
  SYNTHETIC FUSION PROTEN
atgggcagcagccatcatcaccatcaccatgagctccccggggaattcgaggagaagactgttcaaacaggaaagacagatcagcaggttggtgctaaattggtacaggaaatccgtgaaggaaaacgcggaccactatatgctggttattttaggacatggcatgatcgtgcttcaacaggaatagatggtaaacagcaacatccagaaaatactatggctgaggtcccaaaagaagttgatatcttatttgtttttcatgaccatacagcttcagatagtccattttggtctgaattaaaggacagttatgtccataaattacatcaacagggaacggcacttgttcagaacattggtgttaacgaattaaatggacgtacaggtttatctaaagattatcctgatactcctgaggggaacaaagctttagcagcagccattgtcaaggcatttgtaactgatcgtggtgtcgatggactagatattgatattgagcacgaatttacgaacaaaagaacacctgaagaagatgctcgtgctctaaatgtttttaaagagattgcgcagttaataggtaaaaatggtagtgataaatctaaattgctcatcatggacactaccctaagtgttgaaaataatccaatatttaaagggatagcggaagatcttgattatcttcttagacaatattatggttcacaaggtggagaagctgaagtggatactataaactctgattggaaccaatatcagaattatattgatgctagccagttcatgattggattctccttttttgaagaatctgcgtccaaagggaatttatggtttgatgttaacgaatacgaccctaacaatcctgaaaaagggaaagatattgaaggaacacgtgctaaaaaatatgcagagtggcaacctagtacaggtggtttaaaagcaggtatattctcttatgctattgatcgtgatggagtggctcatgttccttcaacatataaaaataggactagtacaaatttacaacggcatgaagtcgataatatctcacatactgactacaccgtatctcgaaaattaaaaacattgatgaccgaagacaaacgctatgatgtcattgatcaaaaagacattcctgacccagcattaagagaacaaatcattcaacaagttggacagtataaaggcgatttggaacgttataacaagacattggtgcttacaggagataagattcaaaatcttaaaggactagaaaaattaagcaagttacaaaaattagagttgcgccagctatctaacgttaaagaaattactccagaacttttgccggaaagcatgaaaaaagatgctgagcttgttatggtaggcatgactggtttagaaaaactaaaccttagtggtctaaatcgtcaaactttagacggtatagacgtgaatagtattacgcatttgacatcatttgatatttcacataatagtttggacttgtcggaaaagagtgaagaccgtaaactattaatgactttgatggagcaggtttcaaatcatcaaaaaataacggtgaaaaatacggcttttgaaaatcaaaaaccgaaaggttattatcctcagacgtatgataccaaagaaggtcattatgatgttgataatgcagaacatgatattttaactgattttgtttttggaactgttactaaacgtaatacctttattggagacgaagaagcatttgctatctataaagaaggagctgtcgatggtcgacaatatgtgtctaaagactatacttatgaagcttttcgtaaagactataaaggttacaaggttcatttaactgcttctaacctaggagaaacagttacttctaaggtaactgctactactgatgaaacttacttagtagatgtttctgatggggaaaaagttgttcaccacatgaaactcaatataggatctggtgccatcatgatggaaaatctggcaaaaggggctaaagtgattggtacatctggggactttgagcaagcaaagaagattttcgatggtgaaaagtcagatagattcttcacttggggacaaactaactggatagcttttgatctaggagaaattaatcttgcgaaggaatggcgtttatttaatgcagagacaaatactgaaataaagacagatagtagcttaaacgtggctaaaggacgtcttcagattttaaaagatacaactattgatttagaaaaaatggacataaaaaatcgtaaagagtatctgtcgaatgatgaaaattggactgatgttgctcagatggatgatgcaaaagcgatatttaatagtaaattatccaatgttttatctcggtattggcggttttgtgtagatggtggagctagctcttattaccctcaatataccgaacttcaaatcctcggacaacgtttatcaaatgatgtcgctaatacgctgaaggatgcgatcgctcatatgaacgacaacgtggcgtggttcaagcaggcgaaatatggcatgatgattcactggggtctgtacagcctgctggcgggcgagtatcgtggtgaaagcagcagcgcgtacgcggagtggatccagagcaagtttcaaattccgaacgcggaatacggcaacctggcgaccgcgttcaacccgctgtattttgatgcgaagaaaatcgttgcgctggcgaaacagtgcggcatgcaatacctggtggttaccaccaagcaccacgacggtttcgcgatgtatcacagcaaagtggacgcgtacaacgtttatgatgcgaccccgtttcaccgtgatatcattggcgagctggcggaagcgtgccagaaggcgggtctgaaattcggtctgtactatagccaagacctggattggcacgacccgaacggtggcggttataagagcaacgatgtggagaccgcgggtaccacctgggacaacagctgggatttcccggacgaagatcagaaaaacttcgacctgtgctttgataacaagatcctgccgcaaatcaaagagattatgagcaactacggtgacattgcgaccgcgtggtttgatgtgccgatgaccctgagcgaggcgcagagccaaaccatctatgacaccgttcgtgaactgcaaccgaactgcctgattaacagccgtctgggcaacggcaagtacgacttcgtgagcctgggcgataacgagatcccgaagaacaaagaagatatgaacaagaccgacgttgattacaacgagattaccggcttcaaaccgagcccgctgggcctgtatgaaaccgcgggtaccatcaacgacagctggggttttagctaccacgatcagaactggaagaccccgcgtaccctgtaccgttataaacaacacctgaacgactttggtattaactacctgctgaacgtgggcctggatccgctgggtcgtgttccgatgatggcggaggaaaacctgctggcggcgaaagcgctggaggacgaagcgaaccgtgaattctaa

SEQ ID NO: 56 - protein, 1173 aa, Artificial Sequence
  SYNTHETIC FUSION PROTEN
MGSSHHHHHHELPGEFEEKTVQTGKTDQQVGAKLVQEIREGKRGPLYAGYFRTWHDRASTGIDGKQQHPENTMAEVPKEVDILFVFHDHTASDSPFWSELKDSYVHKLHQQGTALVQNIGVNELNGRTGLSKDYPDTPEGNKALAAAIVKAFVTDRGVDGLDIDIEHEFTNKRTPEEDARALNVFKEIAQLIGKNGSDKSKLLIMDTTLSVENNPIFKGIAEDLDYLLRQYYGSQGGEAEVDTINSDWNQYQNYIDASQFMIGFSFFEESASKGNLWFDVNEYDPNNPEKGKDIEGTRAKKYAEWQPSTGGLKAGIFSYAIDRDGVAHVPSTYKNRTSTNLQRHEVDNISHTDYTVSRKLKTLMTEDKRYDVIDQKDIPDPALREQIIQQVGQYKGDLERYNKTLVLTGDKIQNLKGLEKLSKLQKLELRQLSNVKEITPELLPESMKKDAELVMVGMTGLEKLNLSGLNRQTLDGIDVNSITHLTSFDISHNSLDLSEKSEDRKLLMTLMEQVSNHQKITVKNTAFENQKPKGYYPQTYDTKEGHYDVDNAEHDILTDFVFGTVTKRNTFIGDEEAFAIYKEGAVDGRQYVSKDYTYEAFRKDYKGYKVHLTASNLGETVTSKVTATTDETYLVDVSDGEKVVHHMKLNIGSGAIMMENLAKGAKVIGTSGDFEQAKKIFDGEKSDRFFTWGQTNWIAFDLGEINLAKEWRLFNAETNTEIKTDSSLNVAKGRLQILKDTTIDLEKMDIKNRKEYLSNDENWTDVAQMDDAKAIFNSKLSNVLSRYWRFCVDGGASSYYPQYTELQILGQRLSNDVANTLKDAIAHMNDNVAWFKQAKYGMMIHWGLYSLLAGEYRGESSSAYAEWIQSKFQIPNAEYGNLATAFNPLYFDAKKIVALAKQCGMQYLVVTTKHHDGFAMYHSKVDAYNVYDATPFHRDIIGELAEACQKAGLKFGLYYSQDLDWHDPNGGGYKSNDVETAGTTWDNSWDFPDEDQKNFDLCFDNKILPQIKEIMSNYGDIATAWFDVPMTLSEAQSQTIYDTVRELQPNCLINSRLGNGKYDFVSLGDNEIPKNKEDMNKTDVDYNEITGFKPSPLGLYETAGTINDSWGFSYHDQNWKTPRTLYRYKQHLNDFGINYLLNVGLDPLGRVPMMAEENLLAAKALEDEANREF

SEQ ID NO: 57 - DNA, 3522 bp, Artificial Sequence
  SYNTHETIC FUSION PROTEN
atgggcagcagccatcatcaccatcaccatgagctccccggggaattcgaggagaagactgttcaaacaggaaagacagatcagcaggttggtgctaaattggtacaggaaatccgtgaaggaaaacgcggaccactatatgctggttattttaggacatggcatgatcgtgcttcaacaggaatagatggtaaacagcaacatccagaaaatactatggctgaggtcccaaaagaagttgatatcttatttgtttttcatgaccatacagcttcagatagtccattttggtctgaattaaaggacagttatgtccataaattacatcaacagggaacggcacttgttcagaagattggtgttaacgaattaaatggacgtacaggtttatctaaagattatcctgatactcctgaggggaacaaagctttagcagcagccattgtcaaggcatttgtaactgatcgtggtgtcgatggactagatattgatattgagcacgaatttacgaacaaaagaacacctgaagaagatgctcgtgctctaaatgtttttaaagagattgcgcagttaataggtaaaaatggtagtgataaatctaaattgctcatcatggacactaccctaagtgttgaaaataatccaatatttaaagggatagcggaagatcttgattatcttcttagacaatattatggttcacaaggtggagaagctgaagtggatactataaactctgattggaaccaatatcagaattatattgatgctagccagttcatgattggattctccttttttgaagaatctgcgtccaaagggaatttatggtttgatgttaacgaatacgaccctaacaatcctgaaaaagggaaagatattgaaggaacacgtgctaaaaaatatgcagagtggcaacctagtacaggtggtttaaaagcaggtatattctcttatgctattgatcgtgatggagtggctcatgttccttcaacatataaaaataggactagtacaaatttacaacggcatgaagtcgataatatctcacatactgactacaccgtatctcgaaaattaaaaacattgatgaccgaagacaaacgctatgatgtcattgatcaaaaagacattcctgacccagcattaagagaacaaatcattcaacaagttggacagtataaaggcgatttggaacgttataacaagacattggtgcttacaggagataagattcaaaatcttaaaggactagaaaaattaagcaagttacaaaaattagagttgcgccagctatctaacgttaaagaaattactccagaacttttgccggaaagcatgaaaaaagatgctgagcttgttatggtaggcatgactggtttagaaaaactaaaccttagtggtctaaatcgtcaaactttagacggtatagacgtgaatagtattacgcatttgacatcatttgatatttcacataatagtttggacttgtcggaaaagagtgaagaccgtaaactattaatgactttgatggagcaggtttcaaatcatcaaaaaataacggtgaaaaatacggcttttgaaaatcaaaaaccgaaaggttattatcctcagacgtatgataccaaagaaggtcattatgatgttgataatgcagaacatgatattttaactgattttgtttttggaactgttactaaacgtaatacctttattggagacgaagaagcatttgctatctataaagaaggagctgtcgatggtcgacaatatgtgtctaaagactatacttatgaagcttttcgtaaagactataaaggttacaaggttcatttaactgcttctaacctaggagaaacagttacttctaaggtaactgctactactgatgaaacttacttagtagatgtttctgatggggaaaaagttgttcaccacatgaaactcaatataggatctggtgccatcatgatggaaaatctggcaaaaggggctaaagtgattggtacatctggggactttgagcaagcaaagaagattttcgatggtgaaaagtcagatagattcttcacttggggacaaactaactggatagcttttgatctaggagaaattaatcttgcgaaggaatggcgtttatttaatgcagagacaaatactgaaataaagacagatagtagcttaaacgtggctaaaggacgtcttcagattttaaaagatacaactattgatttagaaaaaatggacataaaaaatcgtaaagagtatctgtcgaatgatgaaaattggactgatgttgctcagatggatgatgcaaaagcgatatttaatagtaaattatccaatgttttatctcggtattggcggttttgtgtagatggtggagctagctcttattaccctcaatataccgaacttcaaatcctcggacaacgtttatcaaatgatgtcgctaatacgctgaaggatgcgatcgctcatatgaacgacaacgtggcgtggttcaagcaggcgaaatatggcatgatgattcactggggtctgtacagcctgctggcgggcgagtatcgtggtgaaagcagcagcgcgtacgcggagtggatccagagcaagtttcaaattccgaacgcggaatacggcaacctggcgaccgcgttcaacccgctgtattttgatgcgaagaaaatcgttgcgctggcgaaacagtgcggcatgcaatacctggtggttaccaccaagcaccacgacggtttcgcgatgtatcacagcaaagtggacgcgtacaacgtttatgatgcgaccccgtttcaccgtgatatcattggcgagctggcggaagcgtgccagaaggcgggtctgaaattcggtctgtactatagccaagacctggattggcacgacccgaacggtggcggttataagagcaacgatgtggagaccgcgggtaccacctgggacaacagctgggatttcccggacgaagatcagaaaaacttcgacctgtgctttgataacaagatcctgccgcaaatcaaagagattatgagcaactacggtgacattgcgaccgcgtggtttgatgtgccgatgaccctgagcgaggcgcagagccaaaccatctatgacaccgttcgtgaactgcaaccgaactgcctgattaacagccgtctgggcaacggcaagtacgacttcgtgagcctgggcgataacgagatcccgaagaacaaagaagatatgaacaagaccgacgttgattacaacgagattaccggcttcaaaccgagcccgctgggcctgtatgaaaccgcgggtaccatcaacgacagctggggttttagctaccacgatcagaactggaagaccccgcgtaccctgtaccgttataaacaacacctgaacgactttggtattaactacctgctgaacgtgggcctggatccgctgggtcgtgttccgatgatggcggaggaaaacctgctggcggcgaaagcgctggaggacgaagcgaaccgtgaattctaa

SEQ ID NO: 58 - protein, 1173 aa, Artificial Sequence
  SYNTHETIC FUSION PROTEN
MGSSHHHHHHELPGEFEEKTVQTGKTDQQVGAKLVQEIREGKRGPLYAGYFRTWHDRASTGIDGKQQHPENTMAEVPKEVDILFVFHDHTASDSPFWSELKDSYVHKLHQQGTALVQKIGVNELNGRTGLSKDYPDTPEGNKALAAAIVKAFVTDRGVDGLDIDIEHEFTNKRTPEEDARALNVFKEIAQLIGKNGSDKSKLLIMDTTLSVENNPIFKGIAEDLDYLLRQYYGSQGGEAEVDTINSDWNQYQNYIDASQFMIGFSFFEESASKGNLWFDVNEYDPNNPEKGKDIEGTRAKKYAEWQPSTGGLKAGIFSYAIDRDGVAHVPSTYKNRTSTNLQRHEVDNISHTDYTVSRKLKTLMTEDKRYDVIDQKDIPDPALREQIIQQVGQYKGDLERYNKTLVLTGDKIQNLKGLEKLSKLQKLELRQLSNVKEITPELLPESMKKDAELVMVGMTGLEKLNLSGLNRQTLDGIDVNSITHLTSFDISHNSLDLSEKSEDRKLLMTLMEQVSNHQKITVKNTAFENQKPKGYYPQTYDTKEGHYDVDNAEHDILTDFVFGTVTKRNTFIGDEEAFAIYKEGAVDGRQYVSKDYTYEAFRKDYKGYKVHLTASNLGETVTSKVTATTDETYLVDVSDGEKVVHHMKLNIGSGAIMMENLAKGAKVIGTSGDFEQAKKIFDGEKSDRFFTWGQTNWIAFDLGEINLAKEWRLFNAETNTEIKTDSSLNVAKGRLQILKDTTIDLEKMDIKNRKEYLSNDENWTDVAQMDDAKAIFNSKLSNVLSRYWRFCVDGGASSYYPQYTELQILGQRLSNDVANTLKDAIAHMNDNVAWFKQAKYGMMIHWGLYSLLAGEYRGESSSAYAEWIQSKFQIPNAEYGNLATAFNPLYFDAKKIVALAKQCGMQYLVVTTKHHDGFAMYHSKVDAYNVYDATPFHRDIIGELAEACQKAGLKFGLYYSQDLDWHDPNGGGYKSNDVETAGTTWDNSWDFPDEDQKNFDLCFDNKILPQIKEIMSNYGDIATAWFDVPMTLSEAQSQTIYDTVRELQPNCLINSRLGNGKYDFVSLGDNEIPKNKEDMNKTDVDYNEITGFKPSPLGLYETAGTINDSWGFSYHDQNWKTPRTLYRYKQHLNDFGINYLLNVGLDPLGRVPMMAEENLLAAKALEDEANREF

SEQ ID NO: 59 - DNA, 3522 bp, Artificial Sequence
  SYNTHETIC FUSION PROTEN
atgggcagcagccatcatcaccatcaccatgagctccccggggaattcgaggagaagactgttcaaacaggaaagacagatcagcaggttggtgctaaattggtacaggaaatccgtgaaggaaaacgcggaccactatatgctggttattttaggacatggcatgatcgtgcttcaacaggaatagatggtaaacagcaacatccagaaaatactatggctgaggtcccaaaagaagttgatatcttatttgtttttcatgaccatacagcttcagatagtccattttggtctgaattaaaggacagttatgtccataaattacatcaacagggaacggcacttgttcagacaattggtgttaacgaattaaatggacgtacaggtttatctaaagattatcctgatactcctgaggggaacaaagctttagcagcagccattgtcaaggcatttgtaactgatcgtggtgtcgatggactacagattgatattgagcacgaatttacgaacaaaagaacacctgaagaagatgctcgtgctctaaatgtttttaaagagattgcgcagttaataggtaaaaatggtagtgataaatctaaattgctcatcatggacactaccctaagtgttgaaaataatccaatatttaaagggatagcggaagatcttgattatcttcttagacaatattatggttcacaaggtggagaagctgaagtggatactataaactctgattggaaccaatatcagaattatattgatgctagccagttcatgattggattctccttttttgaagaatctgcgtccaaagggaatttatggtttgatgttaacgaatacgaccctaacaatcctgaaaaagggaaagatattgaaggaacacgtgctaaaaaatatgcagagtggcaacctagtacaggtggtttaaaagcaggtatattctcttatgctattgatcgtgatggagtggctcatgttccttcaacatataaaaataggactagtacaaatttacaacggcatgaagtcgataatatctcacatactgactacaccgtatctcgaaaattaaaaacattgatgaccgaagacaaacgctatgatgtcattgatcaaaaagacattcctgacccagcattaagagaacaaatcattcaacaagttggacagtataaaggcgatttggaacgttataacaagacattggtgcttacaggagataagattcaaaatcttaaaggactagaaaaattaagcaagttacaaaaattagagttgcgccagctatctaacgttaaagaaattactccagaacttttgccggaaagcatgaaaaaagatgctgagcttgttatggtaggcatgactggtttagaaaaactaaaccttagtggtctaaatcgtcaaactttagacggtatagacgtgaatagtattacgcatttgacatcatttgatatttcacataatagtttggacttgtcggaaaagagtgaagaccgtaaactattaatgactttgatggagcaggtttcaaatcatcaaaaaataacggtgaaaaatacggcttttgaaaatcaaaaaccgaaaggttattatcctcagacgtatgataccaaagaaggtcattatgatgttgataatgcagaacatgatattttaactgattttgtttttggaactgttactaaacgtaatacctttattggagacgaagaagcatttgctatctataaagaaggagctgtcgatggtcgacaatatgtgtctaaagactatacttatgaagcttttcgtaaagactataaaggttacaaggttcatttaactgcttctaacctaggagaaacagttacttctaaggtaactgctactactgatgaaacttacttagtagatgtttctgatggggaaaaagttgttcaccacatgaaactcaatataggatctggtgccatcatgatggaaaatctggcaaaaggggctaaagtgattggtacatctggggactttgagcaagcaaagaagattttcgatggtgaaaagtcagatagattcttcacttggggacaaactaactggatagcttttgatctaggagaaattaatcttgcgaaggaatggcgtttatttaatgcagagacaaatactgaaataaagacagatagtagcttaaacgtggctaaaggacgtcttcagattttaaaagatacaactattgatttagaaaaaatggacataaaaaatcgtaaagagtatctgtcgaatgatgaaaattggactgatgttgctcagatggatgatgcaaaagcgatatttaatagtaaattatccaatgttttatctcggtattggcggttttgtgtagatggtggagctagctcttattaccctcaatataccgaacttcaaatcctcggacaacgtttatcaaatgatgtcgctaatacgctgaaggatgcgatcgctcatatgaacgacaacgtggcgtggttcaagcaggcgaaatatggcatgatgattcactggggtctgtacagcctgctggcgggcgagtatcgtggtgaaagcagcagcgcgtacgcggagtggatccagagcaagtttcaaattccgaacgcggaatacggcaacctggcgaccgcgttcaacccgctgtattttgatgcgaagaaaatcgttgcgctggcgaaacagtgcggcatgcaatacctggtggttaccaccaagcaccacgacggtttcgcgatgtatcacagcaaagtggacgcgtacaacgtttatgatgcgaccccgtttcaccgtgatatcattggcgagctggcggaagcgtgccagaaggcgggtctgaaattcggtctgtactatagccaagacctggattggcacgacccgaacggtggcggttataagagcaacgatgtggagaccgcgggtaccacctgggacaacagctgggatttcccggacgaagatcagaaaaacttcgacctgtgctttgataacaagatcctgccgcaaatcaaagagattatgagcaactacggtgacattgcgaccgcgtggtttgatgtgccgatgaccctgagcgaggcgcagagccaaaccatctatgacaccgttcgtgaactgcaaccgaactgcctgattaacagccgtctgggcaacggcaagtacgacttcgtgagcctgggcgataacgagatcccgaagaacaaagaagatatgaacaagaccgacgttgattacaacgagattaccggcttcaaaccgagcccgctgggcctgtatgaaaccgcgggtaccatcaacgacagctggggttttagctaccacgatcagaactggaagaccccgcgtaccctgtaccgttataaacaacacctgaacgactttggtattaactacctgctgaacgtgggcctggatccgctgggtcgtgttccgatgatggcggaggaaaacctgctggcggcgaaagcgctggaggacgaagcgaaccgtgaattctaa

SEQ ID NO: 60 - protein, 1173 aa, Artificial Sequence
  SYNTHETIC FUSION PROTEN
MGSSHHHHHHELPGEFEEKTVQTGKTDQQVGAKLVQEIREGKRGPLYAGYFRTWHDRASTGIDGKQQHPENTMAEVPKEVDILFVFHDHTASDSPFWSELKDSYVHKLHQQGTALVQTIGVNELNGRTGLSKDYPDTPEGNKALAAAIVKAFVTDRGVDGLQIDIEHEFTNKRTPEEDARALNVFKEIAQLIGKNGSDKSKLLIMDTTLSVENNPIFKGIAEDLDYLLRQYYGSQGGEAEVDTINSDWNQYQNYIDASQFMIGFSFFEESASKGNLWFDVNEYDPNNPEKGKDIEGTRAKKYAEWQPSTGGLKAGIFSYAIDRDGVAHVPSTYKNRTSTNLQRHEVDNISHTDYTVSRKLKTLMTEDKRYDVIDQKDIPDPALREQIIQQVGQYKGDLERYNKTLVLTGDKIQNLKGLEKLSKLQKLELRQLSNVKEITPELLPESMKKDAELVMVGMTGLEKLNLSGLNRQTLDGIDVNSITHLTSFDISHNSLDLSEKSEDRKLLMTLMEQVSNHQKITVKNTAFENQKPKGYYPQTYDTKEGHYDVDNAEHDILTDFVFGTVTKRNTFIGDEEAFAIYKEGAVDGRQYVSKDYTYEAFRKDYKGYKVHLTASNLGETVTSKVTATTDETYLVDVSDGEKVVHHMKLNIGSGAIMMENLAKGAKVIGTSGDFEQAKKIFDGEKSDRFFTWGQTNWIAFDLGEINLAKEWRLFNAETNTEIKTDSSLNVAKGRLQILKDTTIDLEKMDIKNRKEYLSNDENWTDVAQMDDAKAIFNSKLSNVLSRYWRFCVDGGASSYYPQYTELQILGQRLSNDVANTLKDAIAHMNDNVAWFKQAKYGMMIHWGLYSLLAGEYRGESSSAYAEWIQSKFQIPNAEYGNLATAFNPLYFDAKKIVALAKQCGMQYLVVTTKHHDGFAMYHSKVDAYNVYDATPFHRDIIGELAEACQKAGLKFGLYYSQDLDWHDPNGGGYKSNDVETAGTTWDNSWDFPDEDQKNFDLCFDNKILPQIKEIMSNYGDIATAWFDVPMTLSEAQSQTIYDTVRELQPNCLINSRLGNGKYDFVSLGDNEIPKNKEDMNKTDVDYNEITGFKPSPLGLYETAGTINDSWGFSYHDQNWKTPRTLYRYKQHLNDFGINYLLNVGLDPLGRVPMMAEENLLAAKALEDEANREF

SEQ ID NO: 61 - DNA, 3522 bp, Artificial Sequence
  SYNTHETIC FUSION PROTEN
atgggcagcagccatcatcaccatcaccatgagctccccggggaattcgaggagaagactgttcaaacaggaaagacagatcagcaggttggtgctaaattggtacaggaaatccgtgaaggaaaacgcggaccactatatgctggttattttaggacatggcatgatcgtgcttcaacaggaatagatggtaaacagcaacatccagaaaatactatggctgaggtcccaaaagaagttgatatcttatttgtttttcatgaccatacagcttcagatagtccattttggtctgaattaaaggacagttatgtccataaattacatcaacagggaacggcacttgttcagacaattggtgttaacgaattaaatggacgtacaggtttatctaaagattatcctgatactcctgaggggaacaaagctttagcagcagccattgtcaaggcatttgtaactgatcgtggtgtcgatggactagatattatgattgagcacgaatttacgaacaaaagaacacctgaagaagatgctcgtgctctaaatgtttttaaagagattgcgcagttaataggtaaaaatggtagtgataaatctaaattgctcatcatggacactaccctaagtgttgaaaataatccaatatttaaagggatagcggaagatcttgattatcttcttagacaatattatggttcacaaggtggagaagctgaagtggatactataaactctgattggaaccaatatcagaattatattgatgctagccagttcatgattggattctccttttttgaagaatctgcgtccaaagggaatttatggtttgatgttaacgaatacgaccctaacaatcctgaaaaagggaaagatattgaaggaacacgtgctaaaaaatatgcagagtggcaacctagtacaggtggtttaaaagcaggtatattctcttatgctattgatcgtgatggagtggctcatgttccttcaacatataaaaataggactagtacaaatttacaacggcatgaagtcgataatatctcacatactgactacaccgtatctcgaaaattaaaaacattgatgaccgaagacaaacgctatgatgtcattgatcaaaaagacattcctgacccagcattaagagaacaaatcattcaacaagttggacagtataaaggcgatttggaacgttataacaagacattggtgcttacaggagataagattcaaaatcttaaaggactagaaaaattaagcaagttacaaaaattagagttgcgccagctatctaacgttaaagaaattactccagaacttttgccggaaagcatgaaaaaagatgctgagcttgttatggtaggcatgactggtttagaaaaactaaaccttagtggtctaaatcgtcaaactttagacggtatagacgtgaatagtattacgcatttgacatcatttgatatttcacataatagtttggacttgtcggaaaagagtgaagaccgtaaactattaatgactttgatggagcaggtttcaaatcatcaaaaaataacggtgaaaaatacggcttttgaaaatcaaaaaccgaaaggttattatcctcagacgtatgataccaaagaaggtcattatgatgttgataatgcagaacatgatattttaactgattttgtttttggaactgttactaaacgtaatacctttattggagacgaagaagcatttgctatctataaagaaggagctgtcgatggtcgacaatatgtgtctaaagactatacttatgaagcttttcgtaaagactataaaggttacaaggttcatttaactgcttctaacctaggagaaacagttacttctaaggtaactgctactactgatgaaacttacttagtagatgtttctgatggggaaaaagttgttcaccacatgaaactcaatataggatctggtgccatcatgatggaaaatctggcaaaaggggctaaagtgattggtacatctggggactttgagcaagcaaagaagattttcgatggtgaaaagtcagatagattcttcacttggggacaaactaactggatagcttttgatctaggagaaattaatcttgcgaaggaatggcgtttatttaatgcagagacaaatactgaaataaagacagatagtagcttaaacgtggctaaaggacgtcttcagattttaaaagatacaactattgatttagaaaaaatggacataaaaaatcgtaaagagtatctgtcgaatgatgaaaattggactgatgttgctcagatggatgatgcaaaagcgatatttaatagtaaattatccaatgttttatctcggtattggcggttttgtgtagatggtggagctagctcttattaccctcaatataccgaacttcaaatcctcggacaacgtttatcaaatgatgtcgctaatacgctgaaggatgcgatcgctcatatgaacgacaacgtggcgtggttcaagcaggcgaaatatggcatgatgattcactggggtctgtacagcctgctggcgggcgagtatcgtggtgaaagcagcagcgcgtacgcggagtggatccagagcaagtttcaaattccgaacgcggaatacggcaacctggcgaccgcgttcaacccgctgtattttgatgcgaagaaaatcgttgcgctggcgaaacagtgcggcatgcaatacctggtggttaccaccaagcaccacgacggtttcgcgatgtatcacagcaaagtggacgcgtacaacgtttatgatgcgaccccgtttcaccgtgatatcattggcgagctggcggaagcgtgccagaaggcgggtctgaaattcggtctgtactatagccaagacctggattggcacgacccgaacggtggcggttataagagcaacgatgtggagaccgcgggtaccacctgggacaacagctgggatttcccggacgaagatcagaaaaacttcgacctgtgctttgataacaagatcctgccgcaaatcaaagagattatgagcaactacggtgacattgcgaccgcgtggtttgatgtgccgatgaccctgagcgaggcgcagagccaaaccatctatgacaccgttcgtgaactgcaaccgaactgcctgattaacagccgtctgggcaacggcaagtacgacttcgtgagcctgggcgataacgagatcccgaagaacaaagaagatatgaacaagaccgacgttgattacaacgagattaccggcttcaaaccgagcccgctgggcctgtatgaaaccgcgggtaccatcaacgacagctggggttttagctaccacgatcagaactggaagaccccgcgtaccctgtaccgttataaacaacacctgaacgactttggtattaactacctgctgaacgtgggcctggatccgctgggtcgtgttccgatgatggcggaggaaaacctgctggcggcgaaagcgctggaggacgaagcgaaccgtgaattctaa

SEQ ID NO: 62 - protein, 1173 aa, Artificial Sequence
  SYNTHETIC FUSION PROTEN
MGSSHHHHHHELPGEFEEKTVQTGKTDQQVGAKLVQEIREGKRGPLYAGYFRTWHDRASTGIDGKQQHPENTMAEVPKEVDILFVFHDHTASDSPFWSELKDSYVHKLHQQGTALVQTIGVNELNGRTGLSKDYPDTPEGNKALAAAIVKAFVTDRGVDGLDIMIEHEFTNKRTPEEDARALNVFKEIAQLIGKNGSDKSKLLIMDTTLSVENNPIFKGIAEDLDYLLRQYYGSQGGEAEVDTINSDWNQYQNYIDASQFMIGFSFFEESASKGNLWFDVNEYDPNNPEKGKDIEGTRAKKYAEWQPSTGGLKAGIFSYAIDRDGVAHVPSTYKNRTSTNLQRHEVDNISHTDYTVSRKLKTLMTEDKRYDVIDQKDIPDPALREQIIQQVGQYKGDLERYNKTLVLTGDKIQNLKGLEKLSKLQKLELRQLSNVKEITPELLPESMKKDAELVMVGMTGLEKLNLSGLNRQTLDGIDVNSITHLTSFDISHNSLDLSEKSEDRKLLMTLMEQVSNHQKITVKNTAFENQKPKGYYPQTYDTKEGHYDVDNAEHDILTDFVFGTVTKRNTFIGDEEAFAIYKEGAVDGRQYVSKDYTYEAFRKDYKGYKVHLTASNLGETVTSKVTATTDETYLVDVSDGEKVVHHMKLNIGSGAIMMENLAKGAKVIGTSGDFEQAKKIFDGEKSDRFFTWGQTNWIAFDLGEINLAKEWRLFNAETNTEIKTDSSLNVAKGRLQILKDTTIDLEKMDIKNRKEYLSNDENWTDVAQMDDAKAIFNSKLSNVLSRYWRFCVDGGASSYYPQYTELQILGQRLSNDVANTLKDAIAHMNDNVAWFKQAKYGMMIHWGLYSLLAGEYRGESSSAYAEWIQSKFQIPNAEYGNLATAFNPLYFDAKKIVALAKQCGMQYLVVTTKHHDGFAMYHSKVDAYNVYDATPFHRDIIGELAEACQKAGLKFGLYYSQDLDWHDPNGGGYKSNDVETAGTTWDNSWDFPDEDQKNFDLCFDNKILPQIKEIMSNYGDIATAWFDVPMTLSEAQSQTIYDTVRELQPNCLINSRLGNGKYDFVSLGDNEIPKNKEDMNKTDVDYNEITGFKPSPLGLYETAGTINDSWGFSYHDQNWKTPRTLYRYKQHLNDFGINYLLNVGLDPLGRVPMMAEENLLAAKALEDEANREF

SEQ ID NO: 63 - DNA, 3522 bp, Artificial Sequence
  SYNTHETIC FUSION PROTEN
atgggcagcagccatcatcaccatcaccatgagctccccggggaattcgaggagaagactgttcaaacaggaaagacagatcagcaggttggtgctaaattggtacaggaaatccgtgaaggaaaacgcggaccactatatgctggttattttaggacatggcatgatcgtgcttcaacaggaatagatggtaaacagcaacatccagaaaatactatggctgaggtcccaaaagaagttgatatcttatttgtttttcatgaccatacagcttcagatagtccattttggtctgaattaaaggacagttatgtccataaattacatcaacagggaacggcacttgttcagacaattggtgttaacgaattaaatggacgtacaggtttatctaaagattatcctgatactcctgaggggaacaaagctttagcagcagccattgtcaaggcatttgtaactgatcgtggtgtcgatggactagatattcagattgagcacgaatttacgaacaaaagaacacctgaagaagatgctcgtgctctaaatgtttttaaagagattgcgcagttaataggtaaaaatggtagtgataaatctaaattgctcatcatggacactaccctaagtgttgaaaataatccaatatttaaagggatagcggaagatcttgattatcttcttagacaatattatggttcacaaggtggagaagctgaagtggatactataaactctgattggaaccaatatcagaattatattgatgctagccagttcatgattggattctccttttttgaagaatctgcgtccaaagggaatttatggtttgatgttaacgaatacgaccctaacaatcctgaaaaagggaaagatattgaaggaacacgtgctaaaaaatatgcagagtggcaacctagtacaggtggtttaaaagcaggtatattctcttatgctattgatcgtgatggagtggctcatgttccttcaacatataaaaataggactagtacaaatttacaacggcatgaagtcgataatatctcacatactgactacaccgtatctcgaaaattaaaaacattgatgaccgaagacaaacgctatgatgtcattgatcaaaaagacattcctgacccagcattaagagaacaaatcattcaacaagttggacagtataaaggcgatttggaacgttataacaagacattggtgcttacaggagataagattcaaaatcttaaaggactagaaaaattaagcaagttacaaaaattagagttgcgccagctatctaacgttaaagaaattactccagaacttttgccggaaagcatgaaaaaagatgctgagcttgttatggtaggcatgactggtttagaaaaactaaaccttagtggtctaaatcgtcaaactttagacggtatagacgtgaatagtattacgcatttgacatcatttgatatttcacataatagtttggacttgtcggaaaagagtgaagaccgtaaactattaatgactttgatggagcaggtttcaaatcatcaaaaaataacggtgaaaaatacggcttttgaaaatcaaaaaccgaaaggttattatcctcagacgtatgataccaaagaaggtcattatgatgttgataatgcagaacatgatattttaactgattttgtttttggaactgttactaaacgtaatacctttattggagacgaagaagcatttgctatctataaagaaggagctgtcgatggtcgacaatatgtgtctaaagactatacttatgaagcttttcgtaaagactataaaggttacaaggttcatttaactgcttctaacctaggagaaacagttacttctaaggtaactgctactactgatgaaacttacttagtagatgtttctgatggggaaaaagttgttcaccacatgaaactcaatataggatctggtgccatcatgatggaaaatctggcaaaaggggctaaagtgattggtacatctggggactttgagcaagcaaagaagattttcgatggtgaaaagtcagatagattcttcacttggggacaaactaactggatagcttttgatctaggagaaattaatcttgcgaaggaatggcgtttatttaatgcagagacaaatactgaaataaagacagatagtagcttaaacgtggctaaaggacgtcttcagattttaaaagatacaactattgatttagaaaaaatggacataaaaaatcgtaaagagtatctgtcgaatgatgaaaattggactgatgttgctcagatggatgatgcaaaagcgatatttaatagtaaattatccaatgttttatctcggtattggcggttttgtgtagatggtggagctagctcttattaccctcaatataccgaacttcaaatcctcggacaacgtttatcaaatgatgtcgctaatacgctgaaggatgcgatcgctcatatgaacgacaacgtggcgtggttcaagcaggcgaaatatggcatgatgattcactggggtctgtacagcctgctggcgggcgagtatcgtggtgaaagcagcagcgcgtacgcggagtggatccagagcaagtttcaaattccgaacgcggaatacggcaacctggcgaccgcgttcaacccgctgtattttgatgcgaagaaaatcgttgcgctggcgaaacagtgcggcatgcaatacctggtggttaccaccaagcaccacgacggtttcgcgatgtatcacagcaaagtggacgcgtacaacgtttatgatgcgaccccgtttcaccgtgatatcattggcgagctggcggaagcgtgccagaaggcgggtctgaaattcggtctgtactatagccaagacctggattggcacgacccgaacggtggcggttataagagcaacgatgtggagaccgcgggtaccacctgggacaacagctgggatttcccggacgaagatcagaaaaacttcgacctgtgctttgataacaagatcctgccgcaaatcaaagagattatgagcaactacggtgacattgcgaccgcgtggtttgatgtgccgatgaccctgagcgaggcgcagagccaaaccatctatgacaccgttcgtgaactgcaaccgaactgcctgattaacagccgtctgggcaacggcaagtacgacttcgtgagcctgggcgataacgagatcccgaagaacaaagaagatatgaacaagaccgacgttgattacaacgagattaccggcttcaaaccgagcccgctgggcctgtatgaaaccgcgggtaccatcaacgacagctggggttttagctaccacgatcagaactggaagaccccgcgtaccctgtaccgttataaacaacacctgaacgactttggtattaactacctgctgaacgtgggcctggatccgctgggtcgtgttccgatgatggcggaggaaaacctgctggcggcgaaagcgctggaggacgaagcgaaccgtgaattctaa

SEQ ID NO: 64 - protein, 1173 aa, Artificial Sequence
  SYNTHETIC FUSION PROTEN
MGSSHHHHHHELPGEFEEKTVQTGKTDQQVGAKLVQEIREGKRGPLYAGYFRTWHDRASTGIDGKQQHPENTMAEVPKEVDILFVFHDHTASDSPFWSELKDSYVHKLHQQGTALVQTIGVNELNGRTGLSKDYPDTPEGNKALAAAIVKAFVTDRGVDGLDIQIEHEFTNKRTPEEDARALNVFKEIAQLIGKNGSDKSKLLIMDTTLSVENNPIFKGIAEDLDYLLRQYYGSQGGEAEVDTINSDWNQYQNYIDASQFMIGFSFFEESASKGNLWFDVNEYDPNNPEKGKDIEGTRAKKYAEWQPSTGGLKAGIFSYAIDRDGVAHVPSTYKNRTSTNLQRHEVDNISHTDYTVSRKLKTLMTEDKRYDVIDQKDIPDPALREQIIQQVGQYKGDLERYNKTLVLTGDKIQNLKGLEKLSKLQKLELRQLSNVKEITPELLPESMKKDAELVMVGMTGLEKLNLSGLNRQTLDGIDVNSITHLTSFDISHNSLDLSEKSEDRKLLMTLMEQVSNHQKITVKNTAFENQKPKGYYPQTYDTKEGHYDVDNAEHDILTDFVFGTVTKRNTFIGDEEAFAIYKEGAVDGRQYVSKDYTYEAFRKDYKGYKVHLTASNLGETVTSKVTATTDETYLVDVSDGEKVVHHMKLNIGSGAIMMENLAKGAKVIGTSGDFEQAKKIFDGEKSDRFFTWGQTNWIAFDLGEINLAKEWRLFNAETNTEIKTDSSLNVAKGRLQILKDTTIDLEKMDIKNRKEYLSNDENWTDVAQMDDAKAIFNSKLSNVLSRYWRFCVDGGASSYYPQYTELQILGQRLSNDVANTLKDAIAHMNDNVAWFKQAKYGMMIHWGLYSLLAGEYRGESSSAYAEWIQSKFQIPNAEYGNLATAFNPLYFDAKKIVALAKQCGMQYLVVTTKHHDGFAMYHSKVDAYNVYDATPFHRDIIGELAEACQKAGLKFGLYYSQDLDWHDPNGGGYKSNDVETAGTTWDNSWDFPDEDQKNFDLCFDNKILPQIKEIMSNYGDIATAWFDVPMTLSEAQSQTIYDTVRELQPNCLINSRLGNGKYDFVSLGDNEIPKNKEDMNKTDVDYNEITGFKPSPLGLYETAGTINDSWGFSYHDQNWKTPRTLYRYKQHLNDFGINYLLNVGLDPLGRVPMMAEENLLAAKALEDEANREF

SEQ ID NO: 65 - DNA, 3522 bp, Artificial Sequence
  SYNTHETIC FUSION PROTEN
atgggcagcagccatcatcaccatcaccatgagctccccggggaattcgaggagaagactgttcaaacaggaaagacagatcagcaggttggtgctaaattggtacaggaaatccgtgaaggaaaacgcggaccactatatgctggttattttaggacatggcatgatcgtgcttcaacaggaatagatggtaaacagcaacatccagaaaatactatggctgaggtcccaaaagaagttgatatcttatttgtttttcatgaccatacagcttcagatagtccattttggtctgaattaaaggacagttatgtccataaattacatcaacagggaacggcacttgttcagacaattggtgttaacgaattaaatggacgtacaggtttatctaaagattatcctgatactcctgaggggaacaaagctttagcagcagccattgtcaaggcatttgtaactgatcgtggtgtcgatggactagatattaccattgagcacgaatttacgaacaaaagaacacctgaagaagatgctcgtgctctaaatgtttttaaagagattgcgcagttaataggtaaaaatggtagtgataaatctaaattgctcatcatggacactaccctaagtgttgaaaataatccaatatttaaagggatagcggaagatcttgattatcttcttagacaatattatggttcacaaggtggagaagctgaagtggatactataaactctgattggaaccaatatcagaattatattgatgctagccagttcatgattggattctccttttttgaagaatctgcgtccaaagggaatttatggtttgatgttaacgaatacgaccctaacaatcctgaaaaagggaaagatattgaaggaacacgtgctaaaaaatatgcagagtggcaacctagtacaggtggtttaaaagcaggtatattctcttatgctattgatcgtgatggagtggctcatgttccttcaacatataaaaataggactagtacaaatttacaacggcatgaagtcgataatatctcacatactgactacaccgtatctcgaaaattaaaaacattgatgaccgaagacaaacgctatgatgtcattgatcaaaaagacattcctgacccagcattaagagaacaaatcattcaacaagttggacagtataaaggcgatttggaacgttataacaagacattggtgcttacaggagataagattcaaaatcttaaaggactagaaaaattaagcaagttacaaaaattagagttgcgccagctatctaacgttaaagaaattactccagaacttttgccggaaagcatgaaaaaagatgctgagcttgttatggtaggcatgactggtttagaaaaactaaaccttagtggtctaaatcgtcaaactttagacggtatagacgtgaatagtattacgcatttgacatcatttgatatttcacataatagtttggacttgtcggaaaagagtgaagaccgtaaactattaatgactttgatggagcaggtttcaaatcatcaaaaaataacggtgaaaaatacggcttttgaaaatcaaaaaccgaaaggttattatcctcagacgtatgataccaaagaaggtcattatgatgttgataatgcagaacatgatattttaactgattttgtttttggaactgttactaaacgtaatacctttattggagacgaagaagcatttgctatctataaagaaggagctgtcgatggtcgacaatatgtgtctaaagactatacttatgaagcttttcgtaaagactataaaggttacaaggttcatttaactgcttctaacctaggagaaacagttacttctaaggtaactgctactactgatgaaacttacttagtagatgtttctgatggggaaaaagttgttcaccacatgaaactcaatataggatctggtgccatcatgatggaaaatctggcaaaaggggctaaagtgattggtacatctggggactttgagcaagcaaagaagattttcgatggtgaaaagtcagatagattcttcacttggggacaaactaactggatagcttttgatctaggagaaattaatcttgcgaaggaatggcgtttatttaatgcagagacaaatactgaaataaagacagatagtagcttaaacgtggctaaaggacgtcttcagattttaaaagatacaactattgatttagaaaaaatggacataaaaaatcgtaaagagtatctgtcgaatgatgaaaattggactgatgttgctcagatggatgatgcaaaagcgatatttaatagtaaattatccaatgttttatctcggtattggcggttttgtgtagatggtggagctagctcttattaccctcaatataccgaacttcaaatcctcggacaacgtttatcaaatgatgtcgctaatacgctgaaggatgcgatcgctcatatgaacgacaacgtggcgtggttcaagcaggcgaaatatggcatgatgattcactggggtctgtacagcctgctggcgggcgagtatcgtggtgaaagcagcagcgcgtacgcggagtggatccagagcaagtttcaaattccgaacgcggaatacggcaacctggcgaccgcgttcaacccgctgtattttgatgcgaagaaaatcgttgcgctggcgaaacagtgcggcatgcaatacctggtggttaccaccaagcaccacgacggtttcgcgatgtatcacagcaaagtggacgcgtacaacgtttatgatgcgaccccgtttcaccgtgatatcattggcgagctggcggaagcgtgccagaaggcgggtctgaaattcggtctgtactatagccaagacctggattggcacgacccgaacggtggcggttataagagcaacgatgtggagaccgcgggtaccacctgggacaacagctgggatttcccggacgaagatcagaaaaacttcgacctgtgctttgataacaagatcctgccgcaaatcaaagagattatgagcaactacggtgacattgcgaccgcgtggtttgatgtgccgatgaccctgagcgaggcgcagagccaaaccatctatgacaccgttcgtgaactgcaaccgaactgcctgattaacagccgtctgggcaacggcaagtacgacttcgtgagcctgggcgataacgagatcccgaagaacaaagaagatatgaacaagaccgacgttgattacaacgagattaccggcttcaaaccgagcccgctgggcctgtatgaaaccgcgggtaccatcaacgacagctggggttttagctaccacgatcagaactggaagaccccgcgtaccctgtaccgttataaacaacacctgaacgactttggtattaactacctgctgaacgtgggcctggatccgctgggtcgtgttccgatgatggcggaggaaaacctgctggcggcgaaagcgctggaggacgaagcgaaccgtgaattctaa

SEQ ID NO: 66 - protein, 1173 aa, Artificial Sequence
  SYNTHETIC FUSION PROTEN
MGSSHHHHHHELPGEFEEKTVQTGKTDQQVGAKLVQEIREGKRGPLYAGYFRTWHDRASTGIDGKQQHPENTMAEVPKEVDILFVFHDHTASDSPFWSELKDSYVHKLHQQGTALVQTIGVNELNGRTGLSKDYPDTPEGNKALAAAIVKAFVTDRGVDGLDITIEHEFTNKRTPEEDARALNVFKEIAQLIGKNGSDKSKLLIMDTTLSVENNPIFKGIAEDLDYLLRQYYGSQGGEAEVDTINSDWNQYQNYIDASQFMIGFSFFEESASKGNLWFDVNEYDPNNPEKGKDIEGTRAKKYAEWQPSTGGLKAGIFSYAIDRDGVAHVPSTYKNRTSTNLQRHEVDNISHTDYTVSRKLKTLMTEDKRYDVIDQKDIPDPALREQIIQQVGQYKGDLERYNKTLVLTGDKIQNLKGLEKLSKLQKLELRQLSNVKEITPELLPESMKKDAELVMVGMTGLEKLNLSGLNRQTLDGIDVNSITHLTSFDISHNSLDLSEKSEDRKLLMTLMEQVSNHQKITVKNTAFENQKPKGYYPQTYDTKEGHYDVDNAEHDILTDFVFGTVTKRNTFIGDEEAFAIYKEGAVDGRQYVSKDYTYEAFRKDYKGYKVHLTASNLGETVTSKVTATTDETYLVDVSDGEKVVHHMKLNIGSGAIMMENLAKGAKVIGTSGDFEQAKKIFDGEKSDRFFTWGQTNWIAFDLGEINLAKEWRLFNAETNTEIKTDSSLNVAKGRLQILKDTTIDLEKMDIKNRKEYLSNDENWTDVAQMDDAKAIFNSKLSNVLSRYWRFCVDGGASSYYPQYTELQILGQRLSNDVANTLKDAIAHMNDNVAWFKQAKYGMMIHWGLYSLLAGEYRGESSSAYAEWIQSKFQIPNAEYGNLATAFNPLYFDAKKIVALAKQCGMQYLVVTTKHHDGFAMYHSKVDAYNVYDATPFHRDIIGELAEACQKAGLKFGLYYSQDLDWHDPNGGGYKSNDVETAGTTWDNSWDFPDEDQKNFDLCFDNKILPQIKEIMSNYGDIATAWFDVPMTLSEAQSQTIYDTVRELQPNCLINSRLGNGKYDFVSLGDNEIPKNKEDMNKTDVDYNEITGFKPSPLGLYETAGTINDSWGFSYHDQNWKTPRTLYRYKQHLNDFGINYLLNVGLDPLGRVPMMAEENLLAAKALEDEANREF

SEQ ID NO: 67 - DNA, 3522 bp, Artificial Sequence
  SYNTHETIC FUSION PROTEN
atgggcagcagccatcatcaccatcaccatgagctccccggggaattcgaggagaagactgttcaaacaggaaagacagatcagcaggttggtgctaaattggtacaggaaatccgtgaaggaaaacgcggaccactatatgctggttattttaggacatggcatgatcgtgcttcaacaggaatagatggtaaacagcaacatccagaaaatactatggctgaggtcccaaaagaagttgatatcttatttgtttttcatgaccatacagcttcagatagtccattttggtctgaattaaaggacagttatgtccataaattacatcaacagggaacggcacttgttcagacaattggtgttaacgaattaaatggacgtacaggtttatctaaagattatcctgatactcctgaggggaacaaagctttagcagcagccattgtcaaggcatttgtaactgatcgtggtgtcgatggactagatattttgattgagcacgaatttacgaacaaaagaacacctgaagaagatgctcgtgctctaaatgtttttaaagagattgcgcagttaataggtaaaaatggtagtgataaatctaaattgctcatcatggacactaccctaagtgttgaaaataatccaatatttaaagggatagcggaagatcttgattatcttcttagacaatattatggttcacaaggtggagaagctgaagtggatactataaactctgattggaaccaatatcagaattatattgatgctagccagttcatgattggattctccttttttgaagaatctgcgtccaaagggaatttatggtttgatgttaacgaatacgaccctaacaatcctgaaaaagggaaagatattgaaggaacacgtgctaaaaaatatgcagagtggcaacctagtacaggtggtttaaaagcaggtatattctcttatgctattgatcgtgatggagtggctcatgttccttcaacatataaaaataggactagtacaaatttacaacggcatgaagtcgataatatctcacatactgactacaccgtatctcgaaaattaaaaacattgatgaccgaagacaaacgctatgatgtcattgatcaaaaagacattcctgacccagcattaagagaacaaatcattcaacaagttggacagtataaaggcgatttggaacgttataacaagacattggtgcttacaggagataagattcaaaatcttaaaggactagaaaaattaagcaagttacaaaaattagagttgcgccagctatctaacgttaaagaaattactccagaacttttgccggaaagcatgaaaaaagatgctgagcttgttatggtaggcatgactggtttagaaaaactaaaccttagtggtctaaatcgtcaaactttagacggtatagacgtgaatagtattacgcatttgacatcatttgatatttcacataatagtttggacttgtcggaaaagagtgaagaccgtaaactattaatgactttgatggagcaggtttcaaatcatcaaaaaataacggtgaaaaatacggcttttgaaaatcaaaaaccgaaaggttattatcctcagacgtatgataccaaagaaggtcattatgatgttgataatgcagaacatgatattttaactgattttgtttttggaactgttactaaacgtaatacctttattggagacgaagaagcatttgctatctataaagaaggagctgtcgatggtcgacaatatgtgtctaaagactatacttatgaagcttttcgtaaagactataaaggttacaaggttcatttaactgcttctaacctaggagaaacagttacttctaaggtaactgctactactgatgaaacttacttagtagatgtttctgatggggaaaaagttgttcaccacatgaaactcaatataggatctggtgccatcatgatggaaaatctggcaaaaggggctaaagtgattggtacatctggggactttgagcaagcaaagaagattttcgatggtgaaaagtcagatagattcttcacttggggacaaactaactggatagcttttgatctaggagaaattaatcttgcgaaggaatggcgtttatttaatgcagagacaaatactgaaataaagacagatagtagcttaaacgtggctaaaggacgtcttcagattttaaaagatacaactattgatttagaaaaaatggacataaaaaatcgtaaagagtatctgtcgaatgatgaaaattggactgatgttgctcagatggatgatgcaaaagcgatatttaatagtaaattatccaatgttttatctcggtattggcggttttgtgtagatggtggagctagctcttattaccctcaatataccgaacttcaaatcctcggacaacgtttatcaaatgatgtcgctaatacgctgaaggatgcgatcgctcatatgaacgacaacgtggcgtggttcaagcaggcgaaatatggcatgatgattcactggggtctgtacagcctgctggcgggcgagtatcgtggtgaaagcagcagcgcgtacgcggagtggatccagagcaagtttcaaattccgaacgcggaatacggcaacctggcgaccgcgttcaacccgctgtattttgatgcgaagaaaatcgttgcgctggcgaaacagtgcggcatgcaatacctggtggttaccaccaagcaccacgacggtttcgcgatgtatcacagcaaagtggacgcgtacaacgtttatgatgcgaccccgtttcaccgtgatatcattggcgagctggcggaagcgtgccagaaggcgggtctgaaattcggtctgtactatagccaagacctggattggcacgacccgaacggtggcggttataagagcaacgatgtggagaccgcgggtaccacctgggacaacagctgggatttcccggacgaagatcagaaaaacttcgacctgtgctttgataacaagatcctgccgcaaatcaaagagattatgagcaactacggtgacattgcgaccgcgtggtttgatgtgccgatgaccctgagcgaggcgcagagccaaaccatctatgacaccgttcgtgaactgcaaccgaactgcctgattaacagccgtctgggcaacggcaagtacgacttcgtgagcctgggcgataacgagatcccgaagaacaaagaagatatgaacaagaccgacgttgattacaacgagattaccggcttcaaaccgagcccgctgggcctgtatgaaaccgcgggtaccatcaacgacagctggggttttagctaccacgatcagaactggaagaccccgcgtaccctgtaccgttataaacaacacctgaacgactttggtattaactacctgctgaacgtgggcctggatccgctgggtcgtgttccgatgatggcggaggaaaacctgctggcggcgaaagcgctggaggacgaagcgaaccgtgaattctaa

SEQ ID NO: 68 - protein, 1173 aa, Artificial Sequence
  SYNTHETIC FUSION PROTEN
MGSSHHHHHHELPGEFEEKTVQTGKTDQQVGAKLVQEIREGKRGPLYAGYFRTWHDRASTGIDGKQQHPENTMAEVPKEVDILFVFHDHTASDSPFWSELKDSYVHKLHQQGTALVQTIGVNELNGRTGLSKDYPDTPEGNKALAAAIVKAFVTDRGVDGLDILIEHEFTNKRTPEEDARALNVFKEIAQLIGKNGSDKSKLLIMDTTLSVENNPIFKGIAEDLDYLLRQYYGSQGGEAEVDTINSDWNQYQNYIDASQFMIGFSFFEESASKGNLWFDVNEYDPNNPEKGKDIEGTRAKKYAEWQPSTGGLKAGIFSYAIDRDGVAHVPSTYKNRTSTNLQRHEVDNISHTDYTVSRKLKTLMTEDKRYDVIDQKDIPDPALREQIIQQVGQYKGDLERYNKTLVLTGDKIQNLKGLEKLSKLQKLELRQLSNVKEITPELLPESMKKDAELVMVGMTGLEKLNLSGLNRQTLDGIDVNSITHLTSFDISHNSLDLSEKSEDRKLLMTLMEQVSNHQKITVKNTAFENQKPKGYYPQTYDTKEGHYDVDNAEHDILTDFVFGTVTKRNTFIGDEEAFAIYKEGAVDGRQYVSKDYTYEAFRKDYKGYKVHLTASNLGETVTSKVTATTDETYLVDVSDGEKVVHHMKLNIGSGAIMMENLAKGAKVIGTSGDFEQAKKIFDGEKSDRFFTWGQTNWIAFDLGEINLAKEWRLFNAETNTEIKTDSSLNVAKGRLQILKDTTIDLEKMDIKNRKEYLSNDENWTDVAQMDDAKAIFNSKLSNVLSRYWRFCVDGGASSYYPQYTELQILGQRLSNDVANTLKDAIAHMNDNVAWFKQAKYGMMIHWGLYSLLAGEYRGESSSAYAEWIQSKFQIPNAEYGNLATAFNPLYFDAKKIVALAKQCGMQYLVVTTKHHDGFAMYHSKVDAYNVYDATPFHRDIIGELAEACQKAGLKFGLYYSQDLDWHDPNGGGYKSNDVETAGTTWDNSWDFPDEDQKNFDLCFDNKILPQIKEIMSNYGDIATAWFDVPMTLSEAQSQTIYDTVRELQPNCLINSRLGNGKYDFVSLGDNEIPKNKEDMNKTDVDYNEITGFKPSPLGLYETAGTINDSWGFSYHDQNWKTPRTLYRYKQHLNDFGINYLLNVGLDPLGRVPMMAEENLLAAKALEDEANREF

SEQ ID NO: 69 - DNA, 3522 bp, Artificial Sequence
  SYNTHETIC FUSION PROTEN
atgggcagcagccatcatcaccatcaccatgagctccccggggaattcgaggagaagactgttcaaacaggaaagacagatcagcaggttggtgctaaattggtacaggaaatccgtgaaggaaaacgcggaccactatatgctggttattttaggacatggcatgatcgtgcttcaacaggaatagatggtaaacagcaacatccagaaaatactatggctgaggtcccaaaagaagttgatatcttatttgtttttcatgaccatacagcttcagatagtccattttggtctgaattaaaggacagttatgtccataaattacatcaacagggaacggcacttgttcagacaattggtgttaacgaattaaatggacgtacaggtttatctaaagattatcctgatactcctgaggggaacaaagctttagcagcagccattgtcaaggcatttgtaactgatcgtggtgtcgatggactagatatttttattgagcacgaatttacgaacaaaagaacacctgaagaagatgctcgtgctctaaatgtttttaaagagattgcgcagttaataggtaaaaatggtagtgataaatctaaattgctcatcatggacactaccctaagtgttgaaaataatccaatatttaaagggatagcggaagatcttgattatcttcttagacaatattatggttcacaaggtggagaagctgaagtggatactataaactctgattggaaccaatatcagaattatattgatgctagccagttcatgattggattctccttttttgaagaatctgcgtccaaagggaatttatggtttgatgttaacgaatacgaccctaacaatcctgaaaaagggaaagatattgaaggaacacgtgctaaaaaatatgcagagtggcaacctagtacaggtggtttaaaagcaggtatattctcttatgctattgatcgtgatggagtggctcatgttccttcaacatataaaaataggactagtacaaatttacaacggcatgaagtcgataatatctcacatactgactacaccgtatctcgaaaattaaaaacattgatgaccgaagacaaacgctatgatgtcattgatcaaaaagacattcctgacccagcattaagagaacaaatcattcaacaagttggacagtataaaggcgatttggaacgttataacaagacattggtgcttacaggagataagattcaaaatcttaaaggactagaaaaattaagcaagttacaaaaattagagttgcgccagctatctaacgttaaagaaattactccagaacttttgccggaaagcatgaaaaaagatgctgagcttgttatggtaggcatgactggtttagaaaaactaaaccttagtggtctaaatcgtcaaactttagacggtatagacgtgaatagtattacgcatttgacatcatttgatatttcacataatagtttggacttgtcggaaaagagtgaagaccgtaaactattaatgactttgatggagcaggtttcaaatcatcaaaaaataacggtgaaaaatacggcttttgaaaatcaaaaaccgaaaggttattatcctcagacgtatgataccaaagaaggtcattatgatgttgataatgcagaacatgatattttaactgattttgtttttggaactgttactaaacgtaatacctttattggagacgaagaagcatttgctatctataaagaaggagctgtcgatggtcgacaatatgtgtctaaagactatacttatgaagcttttcgtaaagactataaaggttacaaggttcatttaactgcttctaacctaggagaaacagttacttctaaggtaactgctactactgatgaaacttacttagtagatgtttctgatggggaaaaagttgttcaccacatgaaactcaatataggatctggtgccatcatgatggaaaatctggcaaaaggggctaaagtgattggtacatctggggactttgagcaagcaaagaagattttcgatggtgaaaagtcagatagattcttcacttggggacaaactaactggatagcttttgatctaggagaaattaatcttgcgaaggaatggcgtttatttaatgcagagacaaatactgaaataaagacagatagtagcttaaacgtggctaaaggacgtcttcagattttaaaagatacaactattgatttagaaaaaatggacataaaaaatcgtaaagagtatctgtcgaatgatgaaaattggactgatgttgctcagatggatgatgcaaaagcgatatttaatagtaaattatccaatgttttatctcggtattggcggttttgtgtagatggtggagctagctcttattaccctcaatataccgaacttcaaatcctcggacaacgtttatcaaatgatgtcgctaatacgctgaaggatgcgatcgctcatatgaacgacaacgtggcgtggttcaagcaggcgaaatatggcatgatgattcactggggtctgtacagcctgctggcgggcgagtatcgtggtgaaagcagcagcgcgtacgcggagtggatccagagcaagtttcaaattccgaacgcggaatacggcaacctggcgaccgcgttcaacccgctgtattttgatgcgaagaaaatcgttgcgctggcgaaacagtgcggcatgcaatacctggtggttaccaccaagcaccacgacggtttcgcgatgtatcacagcaaagtggacgcgtacaacgtttatgatgcgaccccgtttcaccgtgatatcattggcgagctggcggaagcgtgccagaaggcgggtctgaaattcggtctgtactatagccaagacctggattggcacgacccgaacggtggcggttataagagcaacgatgtggagaccgcgggtaccacctgggacaacagctgggatttcccggacgaagatcagaaaaacttcgacctgtgctttgataacaagatcctgccgcaaatcaaagagattatgagcaactacggtgacattgcgaccgcgtggtttgatgtgccgatgaccctgagcgaggcgcagagccaaaccatctatgacaccgttcgtgaactgcaaccgaactgcctgattaacagccgtctgggcaacggcaagtacgacttcgtgagcctgggcgataacgagatcccgaagaacaaagaagatatgaacaagaccgacgttgattacaacgagattaccggcttcaaaccgagcccgctgggcctgtatgaaaccgcgggtaccatcaacgacagctggggttttagctaccacgatcagaactggaagaccccgcgtaccctgtaccgttataaacaacacctgaacgactttggtattaactacctgctgaacgtgggcctggatccgctgggtcgtgttccgatgatggcggaggaaaacctgctggcggcgaaagcgctggaggacgaagcgaaccgtgaattctaa

SEQ ID NO: 70 - protein, 1173 aa, Artificial Sequence
  SYNTHETIC FUSION PROTEN
MGSSHHHHHHELPGEFEEKTVQTGKTDQQVGAKLVQEIREGKRGPLYAGYFRTWHDRASTGIDGKQQHPENTMAEVPKEVDILFVFHDHTASDSPFWSELKDSYVHKLHQQGTALVQTIGVNELNGRTGLSKDYPDTPEGNKALAAAIVKAFVTDRGVDGLDIFIEHEFTNKRTPEEDARALNVFKEIAQLIGKNGSDKSKLLIMDTTLSVENNPIFKGIAEDLDYLLRQYYGSQGGEAEVDTINSDWNQYQNYIDASQFMIGFSFFEESASKGNLWFDVNEYDPNNPEKGKDIEGTRAKKYAEWQPSTGGLKAGIFSYAIDRDGVAHVPSTYKNRTSTNLQRHEVDNISHTDYTVSRKLKTLMTEDKRYDVIDQKDIPDPALREQIIQQVGQYKGDLERYNKTLVLTGDKIQNLKGLEKLSKLQKLELRQLSNVKEITPELLPESMKKDAELVMVGMTGLEKLNLSGLNRQTLDGIDVNSITHLTSFDISHNSLDLSEKSEDRKLLMTLMEQVSNHQKITVKNTAFENQKPKGYYPQTYDTKEGHYDVDNAEHDILTDFVFGTVTKRNTFIGDEEAFAIYKEGAVDGRQYVSKDYTYEAFRKDYKGYKVHLTASNLGETVTSKVTATTDETYLVDVSDGEKVVHHMKLNIGSGAIMMENLAKGAKVIGTSGDFEQAKKIFDGEKSDRFFTWGQTNWIAFDLGEINLAKEWRLFNAETNTEIKTDSSLNVAKGRLQILKDTTIDLEKMDIKNRKEYLSNDENWTDVAQMDDAKAIFNSKLSNVLSRYWRFCVDGGASSYYPQYTELQILGQRLSNDVANTLKDAIAHMNDNVAWFKQAKYGMMIHWGLYSLLAGEYRGESSSAYAEWIQSKFQIPNAEYGNLATAFNPLYFDAKKIVALAKQCGMQYLVVTTKHHDGFAMYHSKVDAYNVYDATPFHRDIIGELAEACQKAGLKFGLYYSQDLDWHDPNGGGYKSNDVETAGTTWDNSWDFPDEDQKNFDLCFDNKILPQIKEIMSNYGDIATAWFDVPMTLSEAQSQTIYDTVRELQPNCLINSRLGNGKYDFVSLGDNEIPKNKEDMNKTDVDYNEITGFKPSPLGLYETAGTINDSWGFSYHDQNWKTPRTLYRYKQHLNDFGINYLLNVGLDPLGRVPMMAEENLLAAKALEDEANREF

SEQ ID NO: 71 - DNA, 3522 bp, Artificial Sequence
  SYNTHETIC FUSION PROTEN
atgggcagcagccatcatcaccatcaccatgagctccccggggaattcgaggagaagactgttcaaacaggaaagacagatcagcaggttggtgctaaattggtacaggaaatccgtgaaggaaaacgcggaccactatatgctggttattttaggacatggcatgatcgtgcttcaacaggaatagatggtaaacagcaacatccagaaaatactatggctgaggtcccaaaagaagttgatatcttatttgtttttcatgaccatacagcttcagatagtccattttggtctgaattaaaggacagttatgtccataaattacatcaacagggaacggcacttgttcagacaattggtgttaacgaattaaatggacgtacaggtttatctaaagattatcctgatactcctgaggggaacaaagctttagcagcagccattgtcaaggcatttgtaactgatcgtggtgtcgatggactagatatttctattgagcacgaatttacgaacaaaagaacacctgaagaagatgctcgtgctctaaatgtttttaaagagattgcgcagttaataggtaaaaatggtagtgataaatctaaattgctcatcatggacactaccctaagtgttgaaaataatccaatatttaaagggatagcggaagatcttgattatcttcttagacaatattatggttcacaaggtggagaagctgaagtggatactataaactctgattggaaccaatatcagaattatattgatgctagccagttcatgattggattctccttttttgaagaatctgcgtccaaagggaatttatggtttgatgttaacgaatacgaccctaacaatcctgaaaaagggaaagatattgaaggaacacgtgctaaaaaatatgcagagtggcaacctagtacaggtggtttaaaagcaggtatattctcttatgctattgatcgtgatggagtggctcatgttccttcaacatataaaaataggactagtacaaatttacaacggcatgaagtcgataatatctcacatactgactacaccgtatctcgaaaattaaaaacattgatgaccgaagacaaacgctatgatgtcattgatcaaaaagacattcctgacccagcattaagagaacaaatcattcaacaagttggacagtataaaggcgatttggaacgttataacaagacattggtgcttacaggagataagattcaaaatcttaaaggactagaaaaattaagcaagttacaaaaattagagttgcgccagctatctaacgttaaagaaattactccagaacttttgccggaaagcatgaaaaaagatgctgagcttgttatggtaggcatgactggtttagaaaaactaaaccttagtggtctaaatcgtcaaactttagacggtatagacgtgaatagtattacgcatttgacatcatttgatatttcacataatagtttggacttgtcggaaaagagtgaagaccgtaaactattaatgactttgatggagcaggtttcaaatcatcaaaaaataacggtgaaaaatacggcttttgaaaatcaaaaaccgaaaggttattatcctcagacgtatgataccaaagaaggtcattatgatgttgataatgcagaacatgatattttaactgattttgtttttggaactgttactaaacgtaatacctttattggagacgaagaagcatttgctatctataaagaaggagctgtcgatggtcgacaatatgtgtctaaagactatacttatgaagcttttcgtaaagactataaaggttacaaggttcatttaactgcttctaacctaggagaaacagttacttctaaggtaactgctactactgatgaaacttacttagtagatgtttctgatggggaaaaagttgttcaccacatgaaactcaatataggatctggtgccatcatgatggaaaatctggcaaaaggggctaaagtgattggtacatctggggactttgagcaagcaaagaagattttcgatggtgaaaagtcagatagattcttcacttggggacaaactaactggatagcttttgatctaggagaaattaatcttgcgaaggaatggcgtttatttaatgcagagacaaatactgaaataaagacagatagtagcttaaacgtggctaaaggacgtcttcagattttaaaagatacaactattgatttagaaaaaatggacataaaaaatcgtaaagagtatctgtcgaatgatgaaaattggactgatgttgctcagatggatgatgcaaaagcgatatttaatagtaaattatccaatgttttatctcggtattggcggttttgtgtagatggtggagctagctcttattaccctcaatataccgaacttcaaatcctcggacaacgtttatcaaatgatgtcgctaatacgctgaaggatgcgatcgctcatatgaacgacaacgtggcgtggttcaagcaggcgaaatatggcatgatgattcactggggtctgtacagcctgctggcgggcgagtatcgtggtgaaagcagcagcgcgtacgcggagtggatccagagcaagtttcaaattccgaacgcggaatacggcaacctggcgaccgcgttcaacccgctgtattttgatgcgaagaaaatcgttgcgctggcgaaacagtgcggcatgcaatacctggtggttaccaccaagcaccacgacggtttcgcgatgtatcacagcaaagtggacgcgtacaacgtttatgatgcgaccccgtttcaccgtgatatcattggcgagctggcggaagcgtgccagaaggcgggtctgaaattcggtctgtactatagccaagacctggattggcacgacccgaacggtggcggttataagagcaacgatgtggagaccgcgggtaccacctgggacaacagctgggatttcccggacgaagatcagaaaaacttcgacctgtgctttgataacaagatcctgccgcaaatcaaagagattatgagcaactacggtgacattgcgaccgcgtggtttgatgtgccgatgaccctgagcgaggcgcagagccaaaccatctatgacaccgttcgtgaactgcaaccgaactgcctgattaacagccgtctgggcaacggcaagtacgacttcgtgagcctgggcgataacgagatcccgaagaacaaagaagatatgaacaagaccgacgttgattacaacgagattaccggcttcaaaccgagcccgctgggcctgtatgaaaccgcgggtaccatcaacgacagctggggttttagctaccacgatcagaactggaagaccccgcgtaccctgtaccgttataaacaacacctgaacgactttggtattaactacctgctgaacgtgggcctggatccgctgggtcgtgttccgatgatggcggaggaaaacctgctggcggcgaaagcgctggaggacgaagcgaaccgtgaattctaa

SEQ ID NO: 72 - protein, 1173 aa, Artificial Sequence
  SYNTHETIC FUSION PROTEN
MGSSHHHHHHELPGEFEEKTVQTGKTDQQVGAKLVQEIREGKRGPLYAGYFRTWHDRASTGIDGKQQHPENTMAEVPKEVDILFVFHDHTASDSPFWSELKDSYVHKLHQQGTALVQTIGVNELNGRTGLSKDYPDTPEGNKALAAAIVKAFVTDRGVDGLDISIEHEFTNKRTPEEDARALNVFKEIAQLIGKNGSDKSKLLIMDTTLSVENNPIFKGIAEDLDYLLRQYYGSQGGEAEVDTINSDWNQYQNYIDASQFMIGFSFFEESASKGNLWFDVNEYDPNNPEKGKDIEGTRAKKYAEWQPSTGGLKAGIFSYAIDRDGVAHVPSTYKNRTSTNLQRHEVDNISHTDYTVSRKLKTLMTEDKRYDVIDQKDIPDPALREQIIQQVGQYKGDLERYNKTLVLTGDKIQNLKGLEKLSKLQKLELRQLSNVKEITPELLPESMKKDAELVMVGMTGLEKLNLSGLNRQTLDGIDVNSITHLTSFDISHNSLDLSEKSEDRKLLMTLMEQVSNHQKITVKNTAFENQKPKGYYPQTYDTKEGHYDVDNAEHDILTDFVFGTVTKRNTFIGDEEAFAIYKEGAVDGRQYVSKDYTYEAFRKDYKGYKVHLTASNLGETVTSKVTATTDETYLVDVSDGEKVVHHMKLNIGSGAIMMENLAKGAKVIGTSGDFEQAKKIFDGEKSDRFFTWGQTNWIAFDLGEINLAKEWRLFNAETNTEIKTDSSLNVAKGRLQILKDTTIDLEKMDIKNRKEYLSNDENWTDVAQMDDAKAIFNSKLSNVLSRYWRFCVDGGASSYYPQYTELQILGQRLSNDVANTLKDAIAHMNDNVAWFKQAKYGMMIHWGLYSLLAGEYRGESSSAYAEWIQSKFQIPNAEYGNLATAFNPLYFDAKKIVALAKQCGMQYLVVTTKHHDGFAMYHSKVDAYNVYDATPFHRDIIGELAEACQKAGLKFGLYYSQDLDWHDPNGGGYKSNDVETAGTTWDNSWDFPDEDQKNFDLCFDNKILPQIKEIMSNYGDIATAWFDVPMTLSEAQSQTIYDTVRELQPNCLINSRLGNGKYDFVSLGDNEIPKNKEDMNKTDVDYNEITGFKPSPLGLYETAGTINDSWGFSYHDQNWKTPRTLYRYKQHLNDFGINYLLNVGLDPLGRVPMMAEENLLAAKALEDEANREF

SEQ ID NO: 73 - DNA, 3522 bp, Artificial Sequence
  SYNTHETIC FUSION PROTEN
atgggcagcagccatcatcaccatcaccatgagctccccggggaattcgaggagaagactgttcaaacaggaaagacagatcagcaggttggtgctaaattggtacaggaaatccgtgaaggaaaacgcggaccactatatgctggttattttaggacatggcatgatcgtgcttcaacaggaatagatggtaaacagcaacatccagaaaatactatggctgaggtcccaaaagaagttgatatcttatttgtttttcatgaccatacagcttcagatagtccattttggtctgaattaaaggacagttatgtccataaattacatcaacagggaacggcacttgttcagacaattggtgttaacgaattaaatggacgtacaggtttatctaaagattatcctgatactcctgaggggaacaaagctttagcagcagccattgtcaaggcatttgtaactgatcgtggtgtcgatggactagatattgtgattgagcacgaatttacgaacaaaagaacacctgaagaagatgctcgtgctctaaatgtttttaaagagattgcgcagttaataggtaaaaatggtagtgataaatctaaattgctcatcatggacactaccctaagtgttgaaaataatccaatatttaaagggatagcggaagatcttgattatcttcttagacaatattatggttcacaaggtggagaagctgaagtggatactataaactctgattggaaccaatatcagaattatattgatgctagccagttcatgattggattctccttttttgaagaatctgcgtccaaagggaatttatggtttgatgttaacgaatacgaccctaacaatcctgaaaaagggaaagatattgaaggaacacgtgctaaaaaatatgcagagtggcaacctagtacaggtggtttaaaagcaggtatattctcttatgctattgatcgtgatggagtggctcatgttccttcaacatataaaaataggactagtacaaatttacaacggcatgaagtcgataatatctcacatactgactacaccgtatctcgaaaattaaaaacattgatgaccgaagacaaacgctatgatgtcattgatcaaaaagacattcctgacccagcattaagagaacaaatcattcaacaagttggacagtataaaggcgatttggaacgttataacaagacattggtgcttacaggagataagattcaaaatcttaaaggactagaaaaattaagcaagttacaaaaattagagttgcgccagctatctaacgttaaagaaattactccagaacttttgccggaaagcatgaaaaaagatgctgagcttgttatggtaggcatgactggtttagaaaaactaaaccttagtggtctaaatcgtcaaactttagacggtatagacgtgaatagtattacgcatttgacatcatttgatatttcacataatagtttggacttgtcggaaaagagtgaagaccgtaaactattaatgactttgatggagcaggtttcaaatcatcaaaaaataacggtgaaaaatacggcttttgaaaatcaaaaaccgaaaggttattatcctcagacgtatgataccaaagaaggtcattatgatgttgataatgcagaacatgatattttaactgattttgtttttggaactgttactaaacgtaatacctttattggagacgaagaagcatttgctatctataaagaaggagctgtcgatggtcgacaatatgtgtctaaagactatacttatgaagcttttcgtaaagactataaaggttacaaggttcatttaactgcttctaacctaggagaaacagttacttctaaggtaactgctactactgatgaaacttacttagtagatgtttctgatggggaaaaagttgttcaccacatgaaactcaatataggatctggtgccatcatgatggaaaatctggcaaaaggggctaaagtgattggtacatctggggactttgagcaagcaaagaagattttcgatggtgaaaagtcagatagattcttcacttggggacaaactaactggatagcttttgatctaggagaaattaatcttgcgaaggaatggcgtttatttaatgcagagacaaatactgaaataaagacagatagtagcttaaacgtggctaaaggacgtcttcagattttaaaagatacaactattgatttagaaaaaatggacataaaaaatcgtaaagagtatctgtcgaatgatgaaaattggactgatgttgctcagatggatgatgcaaaagcgatatttaatagtaaattatccaatgttttatctcggtattggcggttttgtgtagatggtggagctagctcttattaccctcaatataccgaacttcaaatcctcggacaacgtttatcaaatgatgtcgctaatacgctgaaggatgcgatcgctcatatgaacgacaacgtggcgtggttcaagcaggcgaaatatggcatgatgattcactggggtctgtacagcctgctggcgggcgagtatcgtggtgaaagcagcagcgcgtacgcggagtggatccagagcaagtttcaaattccgaacgcggaatacggcaacctggcgaccgcgttcaacccgctgtattttgatgcgaagaaaatcgttgcgctggcgaaacagtgcggcatgcaatacctggtggttaccaccaagcaccacgacggtttcgcgatgtatcacagcaaagtggacgcgtacaacgtttatgatgcgaccccgtttcaccgtgatatcattggcgagctggcggaagcgtgccagaaggcgggtctgaaattcggtctgtactatagccaagacctggattggcacgacccgaacggtggcggttataagagcaacgatgtggagaccgcgggtaccacctgggacaacagctgggatttcccggacgaagatcagaaaaacttcgacctgtgctttgataacaagatcctgccgcaaatcaaagagattatgagcaactacggtgacattgcgaccgcgtggtttgatgtgccgatgaccctgagcgaggcgcagagccaaaccatctatgacaccgttcgtgaactgcaaccgaactgcctgattaacagccgtctgggcaacggcaagtacgacttcgtgagcctgggcgataacgagatcccgaagaacaaagaagatatgaacaagaccgacgttgattacaacgagattaccggcttcaaaccgagcccgctgggcctgtatgaaaccgcgggtaccatcaacgacagctggggttttagctaccacgatcagaactggaagaccccgcgtaccctgtaccgttataaacaacacctgaacgactttggtattaactacctgctgaacgtgggcctggatccgctgggtcgtgttccgatgatggcggaggaaaacctgctggcggcgaaagcgctggaggacgaagcgaaccgtgaattctaa

SEQ ID NO: 74 - protein, 1173 aa, Artificial Sequence
  SYNTHETIC FUSION PROTEN
MGSSHHHHHHELPGEFEEKTVQTGKTDQQVGAKLVQEIREGKRGPLYAGYFRTWHDRASTGIDGKQQHPENTMAEVPKEVDILFVFHDHTASDSPFWSELKDSYVHKLHQQGTALVQTIGVNELNGRTGLSKDYPDTPEGNKALAAAIVKAFVTDRGVDGLDIVIEHEFTNKRTPEEDARALNVFKEIAQLIGKNGSDKSKLLIMDTTLSVENNPIFKGIAEDLDYLLRQYYGSQGGEAEVDTINSDWNQYQNYIDASQFMIGFSFFEESASKGNLWFDVNEYDPNNPEKGKDIEGTRAKKYAEWQPSTGGLKAGIFSYAIDRDGVAHVPSTYKNRTSTNLQRHEVDNISHTDYTVSRKLKTLMTEDKRYDVIDQKDIPDPALREQIIQQVGQYKGDLERYNKTLVLTGDKIQNLKGLEKLSKLQKLELRQLSNVKEITPELLPESMKKDAELVMVGMTGLEKLNLSGLNRQTLDGIDVNSITHLTSFDISHNSLDLSEKSEDRKLLMTLMEQVSNHQKITVKNTAFENQKPKGYYPQTYDTKEGHYDVDNAEHDILTDFVFGTVTKRNTFIGDEEAFAIYKEGAVDGRQYVSKDYTYEAFRKDYKGYKVHLTASNLGETVTSKVTATTDETYLVDVSDGEKVVHHMKLNIGSGAIMMENLAKGAKVIGTSGDFEQAKKIFDGEKSDRFFTWGQTNWIAFDLGEINLAKEWRLFNAETNTEIKTDSSLNVAKGRLQILKDTTIDLEKMDIKNRKEYLSNDENWTDVAQMDDAKAIFNSKLSNVLSRYWRFCVDGGASSYYPQYTELQILGQRLSNDVANTLKDAIAHMNDNVAWFKQAKYGMMIHWGLYSLLAGEYRGESSSAYAEWIQSKFQIPNAEYGNLATAFNPLYFDAKKIVALAKQCGMQYLVVTTKHHDGFAMYHSKVDAYNVYDATPFHRDIIGELAEACQKAGLKFGLYYSQDLDWHDPNGGGYKSNDVETAGTTWDNSWDFPDEDQKNFDLCFDNKILPQIKEIMSNYGDIATAWFDVPMTLSEAQSQTIYDTVRELQPNCLINSRLGNGKYDFVSLGDNEIPKNKEDMNKTDVDYNEITGFKPSPLGLYETAGTINDSWGFSYHDQNWKTPRTLYRYKQHLNDFGINYLLNVGLDPLGRVPMMAEENLLAAKALEDEANREF

SEQ ID NO: 75 - DNA, 3522 bp, Artificial Sequence
  SYNTHETIC FUSION PROTEN
atgggcagcagccatcatcaccatcaccatgagctccccggggaattcgaggagaagactgttcaaacaggaaagacagatcagcaggttggtgctaaattggtacaggaaatccgtgaaggaaaacgcggaccactatatgctggttattttaggacatggcatgatcgtgcttcaacaggaatagatggtaaacagcaacatccagaaaatactatggctgaggtcccaaaagaagttgatatcttatttgtttttcatgaccatacagcttcagatagtccattttggtctgaattaaaggacagttatgtccataaattacatcaacagggaacggcacttgttcagacaattggtgttaacgaattaaatggacgtacaggtttatctaaagattatcctgatactcctgaggggaacaaagctttagcagcagccattgtcaaggcatttgtaactgatcgtggtgtcgatggactagatattaagattgagcacgaatttacgaacaaaagaacacctgaagaagatgctcgtgctctaaatgtttttaaagagattgcgcagttaataggtaaaaatggtagtgataaatctaaattgctcatcatggacactaccctaagtgttgaaaataatccaatatttaaagggatagcggaagatcttgattatcttcttagacaatattatggttcacaaggtggagaagctgaagtggatactataaactctgattggaaccaatatcagaattatattgatgctagccagttcatgattggattctccttttttgaagaatctgcgtccaaagggaatttatggtttgatgttaacgaatacgaccctaacaatcctgaaaaagggaaagatattgaaggaacacgtgctaaaaaatatgcagagtggcaacctagtacaggtggtttaaaagcaggtatattctcttatgctattgatcgtgatggagtggctcatgttccttcaacatataaaaataggactagtacaaatttacaacggcatgaagtcgataatatctcacatactgactacaccgtatctcgaaaattaaaaacattgatgaccgaagacaaacgctatgatgtcattgatcaaaaagacattcctgacccagcattaagagaacaaatcattcaacaagttggacagtataaaggcgatttggaacgttataacaagacattggtgcttacaggagataagattcaaaatcttaaaggactagaaaaattaagcaagttacaaaaattagagttgcgccagctatctaacgttaaagaaattactccagaacttttgccggaaagcatgaaaaaagatgctgagcttgttatggtaggcatgactggtttagaaaaactaaaccttagtggtctaaatcgtcaaactttagacggtatagacgtgaatagtattacgcatttgacatcatttgatatttcacataatagtttggacttgtcggaaaagagtgaagaccgtaaactattaatgactttgatggagcaggtttcaaatcatcaaaaaataacggtgaaaaatacggcttttgaaaatcaaaaaccgaaaggttattatcctcagacgtatgataccaaagaaggtcattatgatgttgataatgcagaacatgatattttaactgattttgtttttggaactgttactaaacgtaatacctttattggagacgaagaagcatttgctatctataaagaaggagctgtcgatggtcgacaatatgtgtctaaagactatacttatgaagcttttcgtaaagactataaaggttacaaggttcatttaactgcttctaacctaggagaaacagttacttctaaggtaactgctactactgatgaaacttacttagtagatgtttctgatggggaaaaagttgttcaccacatgaaactcaatataggatctggtgccatcatgatggaaaatctggcaaaaggggctaaagtgattggtacatctggggactttgagcaagcaaagaagattttcgatggtgaaaagtcagatagattcttcacttggggacaaactaactggatagcttttgatctaggagaaattaatcttgcgaaggaatggcgtttatttaatgcagagacaaatactgaaataaagacagatagtagcttaaacgtggctaaaggacgtcttcagattttaaaagatacaactattgatttagaaaaaatggacataaaaaatcgtaaagagtatctgtcgaatgatgaaaattggactgatgttgctcagatggatgatgcaaaagcgatatttaatagtaaattatccaatgttttatctcggtattggcggttttgtgtagatggtggagctagctcttattaccctcaatataccgaacttcaaatcctcggacaacgtttatcaaatgatgtcgctaatacgctgaaggatgcgatcgctcatatgaacgacaacgtggcgtggttcaagcaggcgaaatatggcatgatgattcactggggtctgtacagcctgctggcgggcgagtatcgtggtgaaagcagcagcgcgtacgcggagtggatccagagcaagtttcaaattccgaacgcggaatacggcaacctggcgaccgcgttcaacccgctgtattttgatgcgaagaaaatcgttgcgctggcgaaacagtgcggcatgcaatacctggtggttaccaccaagcaccacgacggtttcgcgatgtatcacagcaaagtggacgcgtacaacgtttatgatgcgaccccgtttcaccgtgatatcattggcgagctggcggaagcgtgccagaaggcgggtctgaaattcggtctgtactatagccaagacctggattggcacgacccgaacggtggcggttataagagcaacgatgtggagaccgcgggtaccacctgggacaacagctgggatttcccggacgaagatcagaaaaacttcgacctgtgctttgataacaagatcctgccgcaaatcaaagagattatgagcaactacggtgacattgcgaccgcgtggtttgatgtgccgatgaccctgagcgaggcgcagagccaaaccatctatgacaccgttcgtgaactgcaaccgaactgcctgattaacagccgtctgggcaacggcaagtacgacttcgtgagcctgggcgataacgagatcccgaagaacaaagaagatatgaacaagaccgacgttgattacaacgagattaccggcttcaaaccgagcccgctgggcctgtatgaaaccgcgggtaccatcaacgacagctggggttttagctaccacgatcagaactggaagaccccgcgtaccctgtaccgttataaacaacacctgaacgactttggtattaactacctgctgaacgtgggcctggatccgctgggtcgtgttccgatgatggcggaggaaaacctgctggcggcgaaagcgctggaggacgaagcgaaccgtgaattctaa

SEQ ID NO: 76 - protein, 1173 aa, Artificial Sequence
  SYNTHETIC FUSION PROTEN
MGSSHHHHHHELPGEFEEKTVQTGKTDQQVGAKLVQEIREGKRGPLYAGYFRTWHDRASTGIDGKQQHPENTMAEVPKEVDILFVFHDHTASDSPFWSELKDSYVHKLHQQGTALVQTIGVNELNGRTGLSKDYPDTPEGNKALAAAIVKAFVTDRGVDGLDIKIEHEFTNKRTPEEDARALNVFKEIAQLIGKNGSDKSKLLIMDTTLSVENNPIFKGIAEDLDYLLRQYYGSQGGEAEVDTINSDWNQYQNYIDASQFMIGFSFFEESASKGNLWFDVNEYDPNNPEKGKDIEGTRAKKYAEWQPSTGGLKAGIFSYAIDRDGVAHVPSTYKNRTSTNLQRHEVDNISHTDYTVSRKLKTLMTEDKRYDVIDQKDIPDPALREQIIQQVGQYKGDLERYNKTLVLTGDKIQNLKGLEKLSKLQKLELRQLSNVKEITPELLPESMKKDAELVMVGMTGLEKLNLSGLNRQTLDGIDVNSITHLTSFDISHNSLDLSEKSEDRKLLMTLMEQVSNHQKITVKNTAFENQKPKGYYPQTYDTKEGHYDVDNAEHDILTDFVFGTVTKRNTFIGDEEAFAIYKEGAVDGRQYVSKDYTYEAFRKDYKGYKVHLTASNLGETVTSKVTATTDETYLVDVSDGEKVVHHMKLNIGSGAIMMENLAKGAKVIGTSGDFEQAKKIFDGEKSDRFFTWGQTNWIAFDLGEINLAKEWRLFNAETNTEIKTDSSLNVAKGRLQILKDTTIDLEKMDIKNRKEYLSNDENWTDVAQMDDAKAIFNSKLSNVLSRYWRFCVDGGASSYYPQYTELQILGQRLSNDVANTLKDAIAHMNDNVAWFKQAKYGMMIHWGLYSLLAGEYRGESSSAYAEWIQSKFQIPNAEYGNLATAFNPLYFDAKKIVALAKQCGMQYLVVTTKHHDGFAMYHSKVDAYNVYDATPFHRDIIGELAEACQKAGLKFGLYYSQDLDWHDPNGGGYKSNDVETAGTTWDNSWDFPDEDQKNFDLCFDNKILPQIKEIMSNYGDIATAWFDVPMTLSEAQSQTIYDTVRELQPNCLINSRLGNGKYDFVSLGDNEIPKNKEDMNKTDVDYNEITGFKPSPLGLYETAGTINDSWGFSYHDQNWKTPRTLYRYKQHLNDFGINYLLNVGLDPLGRVPMMAEENLLAAKALEDEANREF

SEQ ID NO: 77 - DNA, 3522 bp, Artificial Sequence
  SYNTHETIC FUSION PROTEN
atgggcagcagccatcatcaccatcaccatgagctccccggggaattcgaggagaagactgttcaaacaggaaagacagatcagcaggttggtgctaaattggtacaggaaatccgtgaaggaaaacgcggaccactatatgctggttattttaggacatggcatgatcgtgcttcaacaggaatagatggtaaacagcaacatccagaaaatactatggctgaggtcccaaaagaagttgatatcttatttgtttttcatgaccatacagcttcagatagtccattttggtctgaattaaaggacagttatgtccataaattacatcaacagggaacggcacttgttcagacaattggtgttaacgaattaaatggacgtacaggtttatctaaagattatcctgatactcctgaggggaacaaagctttagcagcagccattgtcaaggcatttgtaactgatcgtggtgtcgatggactagatatttggattgagcacgaatttacgaacaaaagaacacctgaagaagatgctcgtgctctaaatgtttttaaagagattgcgcagttaataggtaaaaatggtagtgataaatctaaattgctcatcatggacactaccctaagtgttgaaaataatccaatatttaaagggatagcggaagatcttgattatcttcttagacaatattatggttcacaaggtggagaagctgaagtggatactataaactctgattggaaccaatatcagaattatattgatgctagccagttcatgattggattctccttttttgaagaatctgcgtccaaagggaatttatggtttgatgttaacgaatacgaccctaacaatcctgaaaaagggaaagatattgaaggaacacgtgctaaaaaatatgcagagtggcaacctagtacaggtggtttaaaagcaggtatattctcttatgctattgatcgtgatggagtggctcatgttccttcaacatataaaaataggactagtacaaatttacaacggcatgaagtcgataatatctcacatactgactacaccgtatctcgaaaattaaaaacattgatgaccgaagacaaacgctatgatgtcattgatcaaaaagacattcctgacccagcattaagagaacaaatcattcaacaagttggacagtataaaggcgatttggaacgttataacaagacattggtgcttacaggagataagattcaaaatcttaaaggactagaaaaattaagcaagttacaaaaattagagttgcgccagctatctaacgttaaagaaattactccagaacttttgccggaaagcatgaaaaaagatgctgagcttgttatggtaggcatgactggtttagaaaaactaaaccttagtggtctaaatcgtcaaactttagacggtatagacgtgaatagtattacgcatttgacatcatttgatatttcacataatagtttggacttgtcggaaaagagtgaagaccgtaaactattaatgactttgatggagcaggtttcaaatcatcaaaaaataacggtgaaaaatacggcttttgaaaatcaaaaaccgaaaggttattatcctcagacgtatgataccaaagaaggtcattatgatgttgataatgcagaacatgatattttaactgattttgtttttggaactgttactaaacgtaatacctttattggagacgaagaagcatttgctatctataaagaaggagctgtcgatggtcgacaatatgtgtctaaagactatacttatgaagcttttcgtaaagactataaaggttacaaggttcatttaactgcttctaacctaggagaaacagttacttctaaggtaactgctactactgatgaaacttacttagtagatgtttctgatggggaaaaagttgttcaccacatgaaactcaatataggatctggtgccatcatgatggaaaatctggcaaaaggggctaaagtgattggtacatctggggactttgagcaagcaaagaagattttcgatggtgaaaagtcagatagattcttcacttggggacaaactaactggatagcttttgatctaggagaaattaatcttgcgaaggaatggcgtttatttaatgcagagacaaatactgaaataaagacagatagtagcttaaacgtggctaaaggacgtcttcagattttaaaagatacaactattgatttagaaaaaatggacataaaaaatcgtaaagagtatctgtcgaatgatgaaaattggactgatgttgctcagatggatgatgcaaaagcgatatttaatagtaaattatccaatgttttatctcggtattggcggttttgtgtagatggtggagctagctcttattaccctcaatataccgaacttcaaatcctcggacaacgtttatcaaatgatgtcgctaatacgctgaaggatgcgatcgctcatatgaacgacaacgtggcgtggttcaagcaggcgaaatatggcatgatgattcactggggtctgtacagcctgctggcgggcgagtatcgtggtgaaagcagcagcgcgtacgcggagtggatccagagcaagtttcaaattccgaacgcggaatacggcaacctggcgaccgcgttcaacccgctgtattttgatgcgaagaaaatcgttgcgctggcgaaacagtgcggcatgcaatacctggtggttaccaccaagcaccacgacggtttcgcgatgtatcacagcaaagtggacgcgtacaacgtttatgatgcgaccccgtttcaccgtgatatcattggcgagctggcggaagcgtgccagaaggcgggtctgaaattcggtctgtactatagccaagacctggattggcacgacccgaacggtggcggttataagagcaacgatgtggagaccgcgggtaccacctgggacaacagctgggatttcccggacgaagatcagaaaaacttcgacctgtgctttgataacaagatcctgccgcaaatcaaagagattatgagcaactacggtgacattgcgaccgcgtggtttgatgtgccgatgaccctgagcgaggcgcagagccaaaccatctatgacaccgttcgtgaactgcaaccgaactgcctgattaacagccgtctgggcaacggcaagtacgacttcgtgagcctgggcgataacgagatcccgaagaacaaagaagatatgaacaagaccgacgttgattacaacgagattaccggcttcaaaccgagcccgctgggcctgtatgaaaccgcgggtaccatcaacgacagctggggttttagctaccacgatcagaactggaagaccccgcgtaccctgtaccgttataaacaacacctgaacgactttggtattaactacctgctgaacgtgggcctggatccgctgggtcgtgttccgatgatggcggaggaaaacctgctggcggcgaaagcgctggaggacgaagcgaaccgtgaattctaa

SEQ ID NO: 78 - protein, 1173 aa, Artificial Sequence
  SYNTHETIC FUSION PROTEN
MGSSHHHHHHELPGEFEEKTVQTGKTDQQVGAKLVQEIREGKRGPLYAGYFRTWHDRASTGIDGKQQHPENTMAEVPKEVDILFVFHDHTASDSPFWSELKDSYVHKLHQQGTALVQTIGVNELNGRTGLSKDYPDTPEGNKALAAAIVKAFVTDRGVDGLDIWIEHEFTNKRTPEEDARALNVFKEIAQLIGKNGSDKSKLLIMDTTLSVENNPIFKGIAEDLDYLLRQYYGSQGGEAEVDTINSDWNQYQNYIDASQFMIGFSFFEESASKGNLWFDVNEYDPNNPEKGKDIEGTRAKKYAEWQPSTGGLKAGIFSYAIDRDGVAHVPSTYKNRTSTNLQRHEVDNISHTDYTVSRKLKTLMTEDKRYDVIDQKDIPDPALREQIIQQVGQYKGDLERYNKTLVLTGDKIQNLKGLEKLSKLQKLELRQLSNVKEITPELLPESMKKDAELVMVGMTGLEKLNLSGLNRQTLDGIDVNSITHLTSFDISHNSLDLSEKSEDRKLLMTLMEQVSNHQKITVKNTAFENQKPKGYYPQTYDTKEGHYDVDNAEHDILTDFVFGTVTKRNTFIGDEEAFAIYKEGAVDGRQYVSKDYTYEAFRKDYKGYKVHLTASNLGETVTSKVTATTDETYLVDVSDGEKVVHHMKLNIGSGAIMMENLAKGAKVIGTSGDFEQAKKIFDGEKSDRFFTWGQTNWIAFDLGEINLAKEWRLFNAETNTEIKTDSSLNVAKGRLQILKDTTIDLEKMDIKNRKEYLSNDENWTDVAQMDDAKAIFNSKLSNVLSRYWRFCVDGGASSYYPQYTELQILGQRLSNDVANTLKDAIAHMNDNVAWFKQAKYGMMIHWGLYSLLAGEYRGESSSAYAEWIQSKFQIPNAEYGNLATAFNPLYFDAKKIVALAKQCGMQYLVVTTKHHDGFAMYHSKVDAYNVYDATPFHRDIIGELAEACQKAGLKFGLYYSQDLDWHDPNGGGYKSNDVETAGTTWDNSWDFPDEDQKNFDLCFDNKILPQIKEIMSNYGDIATAWFDVPMTLSEAQSQTIYDTVRELQPNCLINSRLGNGKYDFVSLGDNEIPKNKEDMNKTDVDYNEITGFKPSPLGLYETAGTINDSWGFSYHDQNWKTPRTLYRYKQHLNDFGINYLLNVGLDPLGRVPMMAEENLLAAKALEDEANREF

SEQ ID NO: 79 - DNA, 3537 bp, Artificial Sequence
  SYNTHETIC FUSION PROTEN
atgggcagcagccatcatcaccatcaccatgagctccccggggaattcgaggagaagactgttcaaacaggaaagacagatcagcaggttggtgctaaattggtacaggaaatccgtgaaggaaaacgcggaccactatatgctggttattttaggacatggcatgatcgtgcttcaacaggaatagatggtaaacagcaacatccagaaaatactatggctgaggtcccaaaagaagttgatatcttatttgtttttcatgaccatacagcttcagatagtccattttggtctgaattaaaggacagttatgtccataaattacatcaacagggaacggcacttgttcagacaattggtgttaacgaattaaatggacgtacaggtttatctaaagattatcctgatactcctgaggggaacaaagctttagcagcagccattgtcaaggcatttgtaactgatcgtggtgtcgatggactagatattatgattgagcacgaatttacgaacaaaagaacacctgaagaagatgctcgtgctctaaatgtttttaaagagattgcgcagttaataggtaaaaatggtagtgataaatctaaattgctcatcatggacactaccctaagtgttgaaaataatccaatatttaaagggatagcggaagatcttgattatcttcttagacaatattatggttcacaaggtggagaagctgaagtggatactataaactctgattggaaccaatatcagaattatattgatgctagccagttcatgattggattctccttttttgaagaatctgcgtccaaagggaatttatggtttgatgttaacgaatacgaccctaacaatcctgaaaaagggaaagatattgaaggaacacgtgctaaaaaatatgcagagtggcaacctagtacaggtggtttaaaagcaggtatattctcttatgctattgatcgtgatggagtggctcatgttccttcaacatataaaaataggactagtacaaatttacaacggcatgaagtcgataatatctcacatactgactacaccgtatctcgaaaattaaaaacattgatgaccgaagacaaacgctatgatgtcattgatcaaaaagacattcctgacccagcattaagagaacaaatcattcaacaagttggacagtataaaggcgatttggaacgttataacaagacattggtgcttacaggagataagattcaaaatcttaaaggactagaaaaattaagcaagttacaaaaattagagttgcgccagctatctaacgttaaagaaattactccagaacttttgccggaaagcatgaaaaaagatgctgagcttgttatggtaggcatgactggtttagaaaaactaaaccttagtggtctaaatcgtcaaactttagacggtatagacgtgaatagtattacgcatttgacatcatttgatatttcacataatagtttggacttgtcggaaaagagtgaagaccgtaaactattaatgactttgatggagcaggtttcaaatcatcaaaaaataacggtgaaaaatacggcttttgaaaatcaaaaaccgaaaggttattatcctcagacgtatgataccaaagaaggtcattatgatgttgataatgcagaacatgatattttaactgattttgtttttggaactgttactaaacgtaatacctttattggagacgaagaagcatttgctatctataaagaaggagctgtcgatggtcgacaatatgtgtctaaagactatacttatgaagcttttcgtaaagactataaaggttacaaggttcatttaactgcttctaacctaggagaaacagttacttctaaggtaactgctactactgatgaaacttacttagtagatgtttctgatggggaaaaagttgttcaccacatgaaactcaatataggatctggtgccatcatgatggaaaatctggcaaaaggggctaaagtgattggtacatctggggactttgagcaagcaaagaagattttcgatggtgaaaagtcagatagattcttcacttggggacaaactaactggatagcttttgatctaggagaaattaatcttgcgaaggaatggcgtttatttaatgcagagacaaatactgaaataaagacagatagtagcttaaacgtggctaaaggacgtcttcagattttaaaagatacaactattgatttagaaaaaatggacataaaaaatcgtaaagagtatctgtcgaatgatgaaaattggactgatgttgctcagatggatgatgcaaaagcgatatttaatagtaaattatccaatgttttatctcggtattggcggttttgtgtagatggtggagctagctcttattaccctcaatataccgaacttcaaatcctcggacaacgtttatcaaatgatgtcgctaatacgctgaaggatggcggtggcggatcgggcggaggtggctctaacgacaacgtggcgtggttcaagcaggcgaaatatggcatgatgattcactggggtctgtacagcctgctggcgggcgagtatcgtggtgaaagcagcagcgcgtacgcggagtggatccagagcaagtttcaaattccgaacgcggaatacggcaacctggcgaccgcgttcaacccgctgtattttgatgcgaagaaaatcgttgcgctggcgaaacagtgcggcatgcaatacctggtggttaccaccaagcaccacgacggtttcgcgatgtatcacagcaaagtggacgcgtacaacgtttatgatgcgaccccgtttcaccgtgatatcattggcgagctggcggaagcgtgccagaaggcgggtctgaaattcggtctgtactatagccaagacctggattggcacgacccgaacggtggcggttataagagcaacgatgtggagaccgcgggtaccacctgggacaacagctgggatttcccggacgaagatcagaaaaacttcgacctgtgctttgataacaagatcctgccgcaaatcaaagagattatgagcaactacggtgacattgcgaccgcgtggtttgatgtgccgatgaccctgagcgaggcgcagagccaaaccatctatgacaccgttcgtgaactgcaaccgaactgcctgattaacagccgtctgggcaacggcaagtacgacttcgtgagcctgggcgataacgagatcccgaagaacaaagaagatatgaacaagaccgacgttgattacaacgagattaccggcttcaaaccgagcccgctgggcctgtatgaaaccgcgggtaccatcaacgacagctggggttttagctaccacgatcagaactggaagaccccgcgtaccctgtaccgttataaacaacacctgaacgactttggtattaactacctgctgaacgtgggcctggatccgctgggtcgtgttccgatgatggcggaggaaaacctgctggcggcgaaagcgctggaggacgaagcgaaccgtgaattctaa

SEQ ID NO: 80 - protein, 1178 aa, Artificial Sequence
  SYNTHETIC FUSION PROTEN
MGSSHHHHHHELPGEFEEKTVQTGKTDQQVGAKLVQEIREGKRGPLYAGYFRTWHDRASTGIDGKQQHPENTMAEVPKEVDILFVFHDHTASDSPFWSELKDSYVHKLHQQGTALVQTIGVNELNGRTGLSKDYPDTPEGNKALAAAIVKAFVTDRGVDGLDIMIEHEFTNKRTPEEDARALNVFKEIAQLIGKNGSDKSKLLIMDTTLSVENNPIFKGIAEDLDYLLRQYYGSQGGEAEVDTINSDWNQYQNYIDASQFMIGFSFFEESASKGNLWFDVNEYDPNNPEKGKDIEGTRAKKYAEWQPSTGGLKAGIFSYAIDRDGVAHVPSTYKNRTSTNLQRHEVDNISHTDYTVSRKLKTLMTEDKRYDVIDQKDIPDPALREQIIQQVGQYKGDLERYNKTLVLTGDKIQNLKGLEKLSKLQKLELRQLSNVKEITPELLPESMKKDAELVMVGMTGLEKLNLSGLNRQTLDGIDVNSITHLTSFDISHNSLDLSEKSEDRKLLMTLMEQVSNHQKITVKNTAFENQKPKGYYPQTYDTKEGHYDVDNAEHDILTDFVFGTVTKRNTFIGDEEAFAIYKEGAVDGRQYVSKDYTYEAFRKDYKGYKVHLTASNLGETVTSKVTATTDETYLVDVSDGEKVVHHMKLNIGSGAIMMENLAKGAKVIGTSGDFEQAKKIFDGEKSDRFFTWGQTNWIAFDLGEINLAKEWRLFNAETNTEIKTDSSLNVAKGRLQILKDTTIDLEKMDIKNRKEYLSNDENWTDVAQMDDAKAIFNSKLSNVLSRYWRFCVDGGASSYYPQYTELQILGQRLSNDVANTLKDGGGGSGGGGSNDNVAWFKQAKYGMMIHWGLYSLLAGEYRGESSSAYAEWIQSKFQIPNAEYGNLATAFNPLYFDAKKIVALAKQCGMQYLVVTTKHHDGFAMYHSKVDAYNVYDATPFHRDIIGELAEACQKAGLKFGLYYSQDLDWHDPNGGGYKSNDVETAGTTWDNSWDFPDEDQKNFDLCFDNKILPQIKEIMSNYGDIATAWFDVPMTLSEAQSQTIYDTVRELQPNCLINSRLGNGKYDFVSLGDNEIPKNKEDMNKTDVDYNEITGFKPSPLGLYETAGTINDSWGFSYHDQNWKTPRTLYRYKQHLNDFGINYLLNVGLDPLGRVPMMAEENLLAAKALEDEANREF

SEQ ID NO: 81 - DNA, 3567 bp, Artificial Sequence
  SYNTHETIC FUSION PROTEN
atgggcagcagccatcatcaccatcaccatgagctccccggggaattcgaggagaagactgttcaaacaggaaagacagatcagcaggttggtgctaaattggtacaggaaatccgtgaaggaaaacgcggaccactatatgctggttattttaggacatggcatgatcgtgcttcaacaggaatagatggtaaacagcaacatccagaaaatactatggctgaggtcccaaaagaagttgatatcttatttgtttttcatgaccatacagcttcagatagtccattttggtctgaattaaaggacagttatgtccataaattacatcaacagggaacggcacttgttcagacaattggtgttaacgaattaaatggacgtacaggtttatctaaagattatcctgatactcctgaggggaacaaagctttagcagcagccattgtcaaggcatttgtaactgatcgtggtgtcgatggactagatattatgattgagcacgaatttacgaacaaaagaacacctgaagaagatgctcgtgctctaaatgtttttaaagagattgcgcagttaataggtaaaaatggtagtgataaatctaaattgctcatcatggacactaccctaagtgttgaaaataatccaatatttaaagggatagcggaagatcttgattatcttcttagacaatattatggttcacaaggtggagaagctgaagtggatactataaactctgattggaaccaatatcagaattatattgatgctagccagttcatgattggattctccttttttgaagaatctgcgtccaaagggaatttatggtttgatgttaacgaatacgaccctaacaatcctgaaaaagggaaagatattgaaggaacacgtgctaaaaaatatgcagagtggcaacctagtacaggtggtttaaaagcaggtatattctcttatgctattgatcgtgatggagtggctcatgttccttcaacatataaaaataggactagtacaaatttacaacggcatgaagtcgataatatctcacatactgactacaccgtatctcgaaaattaaaaacattgatgaccgaagacaaacgctatgatgtcattgatcaaaaagacattcctgacccagcattaagagaacaaatcattcaacaagttggacagtataaaggcgatttggaacgttataacaagacattggtgcttacaggagataagattcaaaatcttaaaggactagaaaaattaagcaagttacaaaaattagagttgcgccagctatctaacgttaaagaaattactccagaacttttgccggaaagcatgaaaaaagatgctgagcttgttatggtaggcatgactggtttagaaaaactaaaccttagtggtctaaatcgtcaaactttagacggtatagacgtgaatagtattacgcatttgacatcatttgatatttcacataatagtttggacttgtcggaaaagagtgaagaccgtaaactattaatgactttgatggagcaggtttcaaatcatcaaaaaataacggtgaaaaatacggcttttgaaaatcaaaaaccgaaaggttattatcctcagacgtatgataccaaagaaggtcattatgatgttgataatgcagaacatgatattttaactgattttgtttttggaactgttactaaacgtaatacctttattggagacgaagaagcatttgctatctataaagaaggagctgtcgatggtcgacaatatgtgtctaaagactatacttatgaagcttttcgtaaagactataaaggttacaaggttcatttaactgcttctaacctaggagaaacagttacttctaaggtaactgctactactgatgaaacttacttagtagatgtttctgatggggaaaaagttgttcaccacatgaaactcaatataggatctggtgccatcatgatggaaaatctggcaaaaggggctaaagtgattggtacatctggggactttgagcaagcaaagaagattttcgatggtgaaaagtcagatagattcttcacttggggacaaactaactggatagcttttgatctaggagaaattaatcttgcgaaggaatggcgtttatttaatgcagagacaaatactgaaataaagacagatagtagcttaaacgtggctaaaggacgtcttcagattttaaaagatacaactattgatttagaaaaaatggacataaaaaatcgtaaagagtatctgtcgaatgatgaaaattggactgatgttgctcagatggatgatgcaaaagcgatatttaatagtaaattatccaatgttttatctcggtattggcggttttgtgtagatggtggagctagctcttattaccctcaatataccgaacttcaaatcctcggacaacgtttatcaaatgatgtcgctaatacgctgaaggatggcggtggcggatcgggcggtggcggatcgggtggtggtggttctggtggtggtggttctaacgacaacgtggcgtggttcaagcaggcgaaatatggcatgatgattcactggggtctgtacagcctgctggcgggcgagtatcgtggtgaaagcagcagcgcgtacgcggagtggatccagagcaagtttcaaattccgaacgcggaatacggcaacctggcgaccgcgttcaacccgctgtattttgatgcgaagaaaatcgttgcgctggcgaaacagtgcggcatgcaatacctggtggttaccaccaagcaccacgacggtttcgcgatgtatcacagcaaagtggacgcgtacaacgtttatgatgcgaccccgtttcaccgtgatatcattggcgagctggcggaagcgtgccagaaggcgggtctgaaattcggtctgtactatagccaagacctggattggcacgacccgaacggtggcggttataagagcaacgatgtggagaccgcgggtaccacctgggacaacagctgggatttcccggacgaagatcagaaaaacttcgacctgtgctttgataacaagatcctgccgcaaatcaaagagattatgagcaactacggtgacattgcgaccgcgtggtttgatgtgccgatgaccctgagcgaggcgcagagccaaaccatctatgacaccgttcgtgaactgcaaccgaactgcctgattaacagccgtctgggcaacggcaagtacgacttcgtgagcctgggcgataacgagatcccgaagaacaaagaagatatgaacaagaccgacgttgattacaacgagattaccggcttcaaaccgagcccgctgggcctgtatgaaaccgcgggtaccatcaacgacagctggggttttagctaccacgatcagaactggaagaccccgcgtaccctgtaccgttataaacaacacctgaacgactttggtattaactacctgctgaacgtgggcctggatccgctgggtcgtgttccgatgatggcggaggaaaacctgctggcggcgaaagcgctggaggacgaagcgaaccgtgaattctaa

SEQ ID NO: 82 - protein, 1188 aa, Artificial Sequence
  SYNTHETIC FUSION PROTEN
MGSSHHHHHHELPGEFEEKTVQTGKTDQQVGAKLVQEIREGKRGPLYAGYFRTWHDRASTGIDGKQQHPENTMAEVPKEVDILFVFHDHTASDSPFWSELKDSYVHKLHQQGTALVQTIGVNELNGRTGLSKDYPDTPEGNKALAAAIVKAFVTDRGVDGLDIMIEHEFTNKRTPEEDARALNVFKEIAQLIGKNGSDKSKLLIMDTTLSVENNPIFKGIAEDLDYLLRQYYGSQGGEAEVDTINSDWNQYQNYIDASQFMIGFSFFEESASKGNLWFDVNEYDPNNPEKGKDIEGTRAKKYAEWQPSTGGLKAGIFSYAIDRDGVAHVPSTYKNRTSTNLQRHEVDNISHTDYTVSRKLKTLMTEDKRYDVIDQKDIPDPALREQIIQQVGQYKGDLERYNKTLVLTGDKIQNLKGLEKLSKLQKLELRQLSNVKEITPELLPESMKKDAELVMVGMTGLEKLNLSGLNRQTLDGIDVNSITHLTSFDISHNSLDLSEKSEDRKLLMTLMEQVSNHQKITVKNTAFENQKPKGYYPQTYDTKEGHYDVDNAEHDILTDFVFGTVTKRNTFIGDEEAFAIYKEGAVDGRQYVSKDYTYEAFRKDYKGYKVHLTASNLGETVTSKVTATTDETYLVDVSDGEKVVHHMKLNIGSGAIMMENLAKGAKVIGTSGDFEQAKKIFDGEKSDRFFTWGQTNWIAFDLGEINLAKEWRLFNAETNTEIKTDSSLNVAKGRLQILKDTTIDLEKMDIKNRKEYLSNDENWTDVAQMDDAKAIFNSKLSNVLSRYWRFCVDGGASSYYPQYTELQILGQRLSNDVANTLKDGGGGSGGGGSGGGGSGGGGSNDNVAWFKQAKYGMMIHWGLYSLLAGEYRGESSSAYAEWIQSKFQIPNAEYGNLATAFNPLYFDAKKIVALAKQCGMQYLVVTTKHHDGFAMYHSKVDAYNVYDATPFHRDIIGELAEACQKAGLKFGLYYSQDLDWHDPNGGGYKSNDVETAGTTWDNSWDFPDEDQKNFDLCFDNKILPQIKEIMSNYGDIATAWFDVPMTLSEAQSQTIYDTVRELQPNCLINSRLGNGKYDFVSLGDNEIPKNKEDMNKTDVDYNEITGFKPSPLGLYETAGTINDSWGFSYHDQNWKTPRTLYRYKQHLNDFGINYLLNVGLDPLGRVPMMAEENLLAAKALEDEANREF

SEQ ID NO: 83 - DNA, 3522 bp, Artificial Sequence
  SYNTHETIC FUSION PROTEN
atgggcagcagccatcatcaccatcaccatgagctccccggggaattcgaggagaagactgttcaaacaggaaagacagatcagcaggttggtgctaaattggtacaggaaatccgtgaaggaaaacgcggaccactatatgctggttattttaggacatggcatgatcgtgcttcaacaggaatagatggtaaacagcaacatccagaaaatactatggctgaggtcccaaaagaagttgatatcttatttgtttttcatgaccatacagcttcagatagtccattttggtctgaattaaaggacagttatgtccataaattacatcaacagggaacggcacttgttcagacaattggtgttaacgaattaaatggacgtacaggtttatctaaagattatcctgatactcctgaggggaacaaagctttagcagcagccattgtcaaggcatttgtaactgatcgtggtgtcgatggactagatattgatattgcgcacgaatttacgaacaaaagaacacctgaagaagatgctcgtgctctaaatgtttttaaagagattgcgcagttaataggtaaaaatggtagtgataaatctaaattgctcatcatggacactaccctaagtgttgaaaataatccaatatttaaagggatagcggaagatcttgattatcttcttagacaatattatggttcacaaggtggagaagctgaagtggatactataaactctgattggaaccaatatcagaattatattgatgctagccagttcatgattggattctccttttttgaagaatctgcgtccaaagggaatttatggtttgatgttaacgaatacgaccctaacaatcctgaaaaagggaaagatattgaaggaacacgtgctaaaaaatatgcagagtggcaacctagtacaggtggtttaaaagcaggtatattctcttatgctattgatcgtgatggagtggctcatgttccttcaacatataaaaataggactagtacaaatttacaacggcatgaagtcgataatatctcacatactgactacaccgtatctcgaaaattaaaaacattgatgaccgaagacaaacgctatgatgtcattgatcaaaaagacattcctgacccagcattaagagaacaaatcattcaacaagttggacagtataaaggcgatttggaacgttataacaagacattggtgcttacaggagataagattcaaaatcttaaaggactagaaaaattaagcaagttacaaaaattagagttgcgccagctatctaacgttaaagaaattactccagaacttttgccggaaagcatgaaaaaagatgctgagcttgttatggtaggcatgactggtttagaaaaactaaaccttagtggtctaaatcgtcaaactttagacggtatagacgtgaatagtattacgcatttgacatcatttgatatttcacataatagtttggacttgtcggaaaagagtgaagaccgtaaactattaatgactttgatggagcaggtttcaaatcatcaaaaaataacggtgaaaaatacggcttttgaaaatcaaaaaccgaaaggttattatcctcagacgtatgataccaaagaaggtcattatgatgttgataatgcagaacatgatattttaactgattttgtttttggaactgttactaaacgtaatacctttattggagacgaagaagcatttgctatctataaagaaggagctgtcgatggtcgacaatatgtgtctaaagactatacttatgaagcttttcgtaaagactataaaggttacaaggttcatttaactgcttctaacctaggagaaacagttacttctaaggtaactgctactactgatgaaacttacttagtagatgtttctgatggggaaaaagttgttcaccacatgaaactcaatataggatctggtgccatcatgatggaaaatctggcaaaaggggctaaagtgattggtacatctggggactttgagcaagcaaagaagattttcgatggtgaaaagtcagatagattcttcacttggggacaaactaactggatagcttttgatctaggagaaattaatcttgcgaaggaatggcgtttatttaatgcagagacaaatactgaaataaagacagatagtagcttaaacgtggctaaaggacgtcttcagattttaaaagatacaactattgatttagaaaaaatggacataaaaaatcgtaaagagtatctgtcgaatgatgaaaattggactgatgttgctcagatggatgatgcaaaagcgatatttaatagtaaattatccaatgttttatctcggtattggcggttttgtgtagatggtggagctagctcttattaccctcaatataccgaacttcaaatcctcggacaacgtttatcaaatgatgtcgctaatacgctgaaggatgcgatcgctcatatgaacgacaacgtggcgtggttcaagcaggcgaaatatggcatgatgattcactggggtctgtacagcctgctggcgggcgagtatcgtggtgaaagcagcagcgcgtacgcggagtggatccagagcaagtttcaaattccgaacgcggaatacggcaacctggcgaccgcgttcaacccgctgtattttgatgcgaagaaaatcgttgcgctggcgaaacagtgcggcatgcaatacctggtggttaccaccaagcaccacgacggtttcgcgatgtatcacagcaaagtggacgcgtacaacgtttatgatgcgaccccgtttcaccgtgatatcattggcgagctggcggaagcgtgccagaaggcgggtctgaaattcggtctgtactatagccaagacctggattggcacgacccgaacggtggcggttataagagcaacgatgtggagaccgcgggtaccacctgggacaacagctgggatttcccggacgaagatcagaaaaacttcgacctgtgctttgataacaagatcctgccgcaaatcaaagagattatgagcaactacggtgacattgcgaccgcgtggtttgatgtgccgatgaccctgagcgaggcgcagagccaaaccatctatgacaccgttcgtgaactgcaaccgaactgcctgattaacagccgtctgggcaacggcaagtacgacttcgtgagcctgggcgataacgagatcccgaagaacaaagaagatatgaacaagaccgacgttgattacaacgagattaccggcttcaaaccgagcccgctgggcctgtatgaaaccgcgggtaccatcaacgacagctggggttttagctaccacgatcagaactggaagaccccgcgtaccctgtaccgttataaacaacacctgaacgactttggtattaactacctgctgaacgtgggcctggatccgctgggtcgtgttccgatgatggcggaggaaaacctgctggcggcgaaagcgctggaggacgaagcgaaccgtgaattctaa

SEQ ID NO: 84 - protein, 1173 aa, Artificial Sequence
  SYNTHETIC FUSION PROTEN
MGSSHHHHHHELPGEFEEKTVQTGKTDQQVGAKLVQEIREGKRGPLYAGYFRTWHDRASTGIDGKQQHPENTMAEVPKEVDILFVFHDHTASDSPFWSELKDSYVHKLHQQGTALVQTIGVNELNGRTGLSKDYPDTPEGNKALAAAIVKAFVTDRGVDGLDIDIAHEFTNKRTPEEDARALNVFKEIAQLIGKNGSDKSKLLIMDTTLSVENNPIFKGIAEDLDYLLRQYYGSQGGEAEVDTINSDWNQYQNYIDASQFMIGFSFFEESASKGNLWFDVNEYDPNNPEKGKDIEGTRAKKYAEWQPSTGGLKAGIFSYAIDRDGVAHVPSTYKNRTSTNLQRHEVDNISHTDYTVSRKLKTLMTEDKRYDVIDQKDIPDPALREQIIQQVGQYKGDLERYNKTLVLTGDKIQNLKGLEKLSKLQKLELRQLSNVKEITPELLPESMKKDAELVMVGMTGLEKLNLSGLNRQTLDGIDVNSITHLTSFDISHNSLDLSEKSEDRKLLMTLMEQVSNHQKITVKNTAFENQKPKGYYPQTYDTKEGHYDVDNAEHDILTDFVFGTVTKRNTFIGDEEAFAIYKEGAVDGRQYVSKDYTYEAFRKDYKGYKVHLTASNLGETVTSKVTATTDETYLVDVSDGEKVVHHMKLNIGSGAIMMENLAKGAKVIGTSGDFEQAKKIFDGEKSDRFFTWGQTNWIAFDLGEINLAKEWRLFNAETNTEIKTDSSLNVAKGRLQILKDTTIDLEKMDIKNRKEYLSNDENWTDVAQMDDAKAIFNSKLSNVLSRYWRFCVDGGASSYYPQYTELQILGQRLSNDVANTLKDAIAHMNDNVAWFKQAKYGMMIHWGLYSLLAGEYRGESSSAYAEWIQSKFQIPNAEYGNLATAFNPLYFDAKKIVALAKQCGMQYLVVTTKHHDGFAMYHSKVDAYNVYDATPFHRDIIGELAEACQKAGLKFGLYYSQDLDWHDPNGGGYKSNDVETAGTTWDNSWDFPDEDQKNFDLCFDNKILPQIKEIMSNYGDIATAWFDVPMTLSEAQSQTIYDTVRELQPNCLINSRLGNGKYDFVSLGDNEIPKNKEDMNKTDVDYNEITGFKPSPLGLYETAGTINDSWGFSYHDQNWKTPRTLYRYKQHLNDFGINYLLNVGLDPLGRVPMMAEENLLAAKALEDEANREF

SEQ ID NO: 85 - DNA, 3522 bp, Artificial Sequence
  SYNTHETIC FUSION PROTEN
atgggcagcagccatcatcaccatcaccatgagctccccggggaattcgaggagaagactgttcaaacaggaaagacagatcagcaggttggtgctaaattggtacaggaaatccgtgaaggaaaacgcggaccactatatgctggttattttaggacatggcatgatcgtgcttcaacaggaatagatggtaaacagcaacatccagaaaatactatggctgaggtcccaaaagaagttgatatcttatttgtttttcatgaccatacagcttcagatagtccattttggtctgaattaaaggacagttatgtccataaattacatcaacagggaacggcacttgttcagacaattggtgttaacgaattaaatggacgtacaggtttatctaaagattatcctgatactcctgaggggaacaaagctttagcagcagccattgtcaaggcatttgtaactgatcgtggtgtcgatggactagatattgatattgagcacgaatttacgaacaaaagaacacctgaagaagatgctcgtgctctaaatgtttttaaagagattgcgcagttaataggtaaaaatggtagtgataaatctaaattgctcatcatgcagactaccctaagtgttgaaaataatccaatatttaaagggatagcggaagatcttgattatcttcttagacaatattatggttcacaaggtggagaagctgaagtggatactataaactctgattggaaccaatatcagaattatattgatgctagccagttcatgattggattctccttttttgaagaatctgcgtccaaagggaatttatggtttgatgttaacgaatacgaccctaacaatcctgaaaaagggaaagatattgaaggaacacgtgctaaaaaatatgcagagtggcaacctagtacaggtggtttaaaagcaggtatattctcttatgctattgatcgtgatggagtggctcatgttccttcaacatataaaaataggactagtacaaatttacaacggcatgaagtcgataatatctcacatactgactacaccgtatctcgaaaattaaaaacattgatgaccgaagacaaacgctatgatgtcattgatcaaaaagacattcctgacccagcattaagagaacaaatcattcaacaagttggacagtataaaggcgatttggaacgttataacaagacattggtgcttacaggagataagattcaaaatcttaaaggactagaaaaattaagcaagttacaaaaattagagttgcgccagctatctaacgttaaagaaattactccagaacttttgccggaaagcatgaaaaaagatgctgagcttgttatggtaggcatgactggtttagaaaaactaaaccttagtggtctaaatcgtcaaactttagacggtatagacgtgaatagtattacgcatttgacatcatttgatatttcacataatagtttggacttgtcggaaaagagtgaagaccgtaaactattaatgactttgatggagcaggtttcaaatcatcaaaaaataacggtgaaaaatacggcttttgaaaatcaaaaaccgaaaggttattatcctcagacgtatgataccaaagaaggtcattatgatgttgataatgcagaacatgatattttaactgattttgtttttggaactgttactaaacgtaatacctttattggagacgaagaagcatttgctatctataaagaaggagctgtcgatggtcgacaatatgtgtctaaagactatacttatgaagcttttcgtaaagactataaaggttacaaggttcatttaactgcttctaacctaggagaaacagttacttctaaggtaactgctactactgatgaaacttacttagtagatgtttctgatggggaaaaagttgttcaccacatgaaactcaatataggatctggtgccatcatgatggaaaatctggcaaaaggggctaaagtgattggtacatctggggactttgagcaagcaaagaagattttcgatggtgaaaagtcagatagattcttcacttggggacaaactaactggatagcttttgatctaggagaaattaatcttgcgaaggaatggcgtttatttaatgcagagacaaatactgaaataaagacagatagtagcttaaacgtggctaaaggacgtcttcagattttaaaagatacaactattgatttagaaaaaatggacataaaaaatcgtaaagagtatctgtcgaatgatgaaaattggactgatgttgctcagatggatgatgcaaaagcgatatttaatagtaaattatccaatgttttatctcggtattggcggttttgtgtagatggtggagctagctcttattaccctcaatataccgaacttcaaatcctcggacaacgtttatcaaatgatgtcgctaatacgctgaaggatgcgatcgctcatatgaacgacaacgtggcgtggttcaagcaggcgaaatatggcatgatgattcactggggtctgtacagcctgctggcgggcgagtatcgtggtgaaagcagcagcgcgtacgcggagtggatccagagcaagtttcaaattccgaacgcggaatacggcaacctggcgaccgcgttcaacccgctgtattttgatgcgaagaaaatcgttgcgctggcgaaacagtgcggcatgcaatacctggtggttaccaccaagcaccacgacggtttcgcgatgtatcacagcaaagtggacgcgtacaacgtttatgatgcgaccccgtttcaccgtgatatcattggcgagctggcggaagcgtgccagaaggcgggtctgaaattcggtctgtactatagccaagacctggattggcacgacccgaacggtggcggttataagagcaacgatgtggagaccgcgggtaccacctgggacaacagctgggatttcccggacgaagatcagaaaaacttcgacctgtgctttgataacaagatcctgccgcaaatcaaagagattatgagcaactacggtgacattgcgaccgcgtggtttgatgtgccgatgaccctgagcgaggcgcagagccaaaccatctatgacaccgttcgtgaactgcaaccgaactgcctgattaacagccgtctgggcaacggcaagtacgacttcgtgagcctgggcgataacgagatcccgaagaacaaagaagatatgaacaagaccgacgttgattacaacgagattaccggcttcaaaccgagcccgctgggcctgtatgaaaccgcgggtaccatcaacgacagctggggttttagctaccacgatcagaactggaagaccccgcgtaccctgtaccgttataaacaacacctgaacgactttggtattaactacctgctgaacgtgggcctggatccgctgggtcgtgttccgatgatggcggaggaaaacctgctggcggcgaaagcgctggaggacgaagcgaaccgtgaattctaa

SEQ ID NO: 86 - protein, 1173 aa, Artificial Sequence
  SYNTHETIC FUSION PROTEN
MGSSHHHHHHELPGEFEEKTVQTGKTDQQVGAKLVQEIREGKRGPLYAGYFRTWHDRASTGIDGKQQHPENTMAEVPKEVDILFVFHDHTASDSPFWSELKDSYVHKLHQQGTALVQTIGVNELNGRTGLSKDYPDTPEGNKALAAAIVKAFVTDRGVDGLDIDIEHEFTNKRTPEEDARALNVFKEIAQLIGKNGSDKSKLLIMQTTLSVENNPIFKGIAEDLDYLLRQYYGSQGGEAEVDTINSDWNQYQNYIDASQFMIGFSFFEESASKGNLWFDVNEYDPNNPEKGKDIEGTRAKKYAEWQPSTGGLKAGIFSYAIDRDGVAHVPSTYKNRTSTNLQRHEVDNISHTDYTVSRKLKTLMTEDKRYDVIDQKDIPDPALREQIIQQVGQYKGDLERYNKTLVLTGDKIQNLKGLEKLSKLQKLELRQLSNVKEITPELLPESMKKDAELVMVGMTGLEKLNLSGLNRQTLDGIDVNSITHLTSFDISHNSLDLSEKSEDRKLLMTLMEQVSNHQKITVKNTAFENQKPKGYYPQTYDTKEGHYDVDNAEHDILTDFVFGTVTKRNTFIGDEEAFAIYKEGAVDGRQYVSKDYTYEAFRKDYKGYKVHLTASNLGETVTSKVTATTDETYLVDVSDGEKVVHHMKLNIGSGAIMMENLAKGAKVIGTSGDFEQAKKIFDGEKSDRFFTWGQTNWIAFDLGEINLAKEWRLFNAETNTEIKTDSSLNVAKGRLQILKDTTIDLEKMDIKNRKEYLSNDENWTDVAQMDDAKAIFNSKLSNVLSRYWRFCVDGGASSYYPQYTELQILGQRLSNDVANTLKDAIAHMNDNVAWFKQAKYGMMIHWGLYSLLAGEYRGESSSAYAEWIQSKFQIPNAEYGNLATAFNPLYFDAKKIVALAKQCGMQYLVVTTKHHDGFAMYHSKVDAYNVYDATPFHRDIIGELAEACQKAGLKFGLYYSQDLDWHDPNGGGYKSNDVETAGTTWDNSWDFPDEDQKNFDLCFDNKILPQIKEIMSNYGDIATAWFDVPMTLSEAQSQTIYDTVRELQPNCLINSRLGNGKYDFVSLGDNEIPKNKEDMNKTDVDYNEITGFKPSPLGLYETAGTINDSWGFSYHDQNWKTPRTLYRYKQHLNDFGINYLLNVGLDPLGRVPMMAEENLLAAKALEDEANREF

SEQ ID NO: 87 - DNA, 3522 bp, Artificial Sequence
  SYNTHETIC FUSION PROTEN
atgggcagcagccatcatcaccatcaccatgagctccccggggaattcgaggagaagactgttcaaacaggaaagacagatcagcaggttggtgctaaattggtacaggaaatccgtgaaggaaaacgcggaccactatatgctggttattttaggacatggcatgatcgtgcttcaacaggaatagatggtaaacagcaacatccagaaaatactatggctgaggtcccaaaagaagttgatatcttatttgtttttcatgaccatacagcttcagatagtccattttggtctgaattaaaggacagttatgtccataaattacatcaacagggaacggcacttgttcagacaattggtgttaacgaattaaatggacgtacaggtttatctaaagattatcctgatactcctgaggggaacaaagctttagcagcagccattgtcaaggcatttgtaactgatcgtggtgtcgatggactagatattgatattgagcacgaatttacgaacaaaagaacacctgaagaagatgctcgtgctctaaatgtttttaaagagattgcgcagttaataggtaaaaatggtagtgataaatctaaattgctcatcatggaccagaccctaagtgttgaaaataatccaatatttaaagggatagcggaagatcttgattatcttcttagacaatattatggttcacaaggtggagaagctgaagtggatactataaactctgattggaaccaatatcagaattatattgatgctagccagttcatgattggattctccttttttgaagaatctgcgtccaaagggaatttatggtttgatgttaacgaatacgaccctaacaatcctgaaaaagggaaagatattgaaggaacacgtgctaaaaaatatgcagagtggcaacctagtacaggtggtttaaaagcaggtatattctcttatgctattgatcgtgatggagtggctcatgttccttcaacatataaaaataggactagtacaaatttacaacggcatgaagtcgataatatctcacatactgactacaccgtatctcgaaaattaaaaacattgatgaccgaagacaaacgctatgatgtcattgatcaaaaagacattcctgacccagcattaagagaacaaatcattcaacaagttggacagtataaaggcgatttggaacgttataacaagacattggtgcttacaggagataagattcaaaatcttaaaggactagaaaaattaagcaagttacaaaaattagagttgcgccagctatctaacgttaaagaaattactccagaacttttgccggaaagcatgaaaaaagatgctgagcttgttatggtaggcatgactggtttagaaaaactaaaccttagtggtctaaatcgtcaaactttagacggtatagacgtgaatagtattacgcatttgacatcatttgatatttcacataatagtttggacttgtcggaaaagagtgaagaccgtaaactattaatgactttgatggagcaggtttcaaatcatcaaaaaataacggtgaaaaatacggcttttgaaaatcaaaaaccgaaaggttattatcctcagacgtatgataccaaagaaggtcattatgatgttgataatgcagaacatgatattttaactgattttgtttttggaactgttactaaacgtaatacctttattggagacgaagaagcatttgctatctataaagaaggagctgtcgatggtcgacaatatgtgtctaaagactatacttatgaagcttttcgtaaagactataaaggttacaaggttcatttaactgcttctaacctaggagaaacagttacttctaaggtaactgctactactgatgaaacttacttagtagatgtttctgatggggaaaaagttgttcaccacatgaaactcaatataggatctggtgccatcatgatggaaaatctggcaaaaggggctaaagtgattggtacatctggggactttgagcaagcaaagaagattttcgatggtgaaaagtcagatagattcttcacttggggacaaactaactggatagcttttgatctaggagaaattaatcttgcgaaggaatggcgtttatttaatgcagagacaaatactgaaataaagacagatagtagcttaaacgtggctaaaggacgtcttcagattttaaaagatacaactattgatttagaaaaaatggacataaaaaatcgtaaagagtatctgtcgaatgatgaaaattggactgatgttgctcagatggatgatgcaaaagcgatatttaatagtaaattatccaatgttttatctcggtattggcggttttgtgtagatggtggagctagctcttattaccctcaatataccgaacttcaaatcctcggacaacgtttatcaaatgatgtcgctaatacgctgaaggatgcgatcgctcatatgaacgacaacgtggcgtggttcaagcaggcgaaatatggcatgatgattcactggggtctgtacagcctgctggcgggcgagtatcgtggtgaaagcagcagcgcgtacgcggagtggatccagagcaagtttcaaattccgaacgcggaatacggcaacctggcgaccgcgttcaacccgctgtattttgatgcgaagaaaatcgttgcgctggcgaaacagtgcggcatgcaatacctggtggttaccaccaagcaccacgacggtttcgcgatgtatcacagcaaagtggacgcgtacaacgtttatgatgcgaccccgtttcaccgtgatatcattggcgagctggcggaagcgtgccagaaggcgggtctgaaattcggtctgtactatagccaagacctggattggcacgacccgaacggtggcggttataagagcaacgatgtggagaccgcgggtaccacctgggacaacagctgggatttcccggacgaagatcagaaaaacttcgacctgtgctttgataacaagatcctgccgcaaatcaaagagattatgagcaactacggtgacattgcgaccgcgtggtttgatgtgccgatgaccctgagcgaggcgcagagccaaaccatctatgacaccgttcgtgaactgcaaccgaactgcctgattaacagccgtctgggcaacggcaagtacgacttcgtgagcctgggcgataacgagatcccgaagaacaaagaagatatgaacaagaccgacgttgattacaacgagattaccggcttcaaaccgagcccgctgggcctgtatgaaaccgcgggtaccatcaacgacagctggggttttagctaccacgatcagaactggaagaccccgcgtaccctgtaccgttataaacaacacctgaacgactttggtattaactacctgctgaacgtgggcctggatccgctgggtcgtgttccgatgatggcggaggaaaacctgctggcggcgaaagcgctggaggacgaagcgaaccgtgaattctaa

SEQ ID NO: 88 - protein, 1173 aa, Artificial Sequence
  SYNTHETIC FUSION PROTEN
MGSSHHHHHHELPGEFEEKTVQTGKTDQQVGAKLVQEIREGKRGPLYAGYFRTWHDRASTGIDGKQQHPENTMAEVPKEVDILFVFHDHTASDSPFWSELKDSYVHKLHQQGTALVQTIGVNELNGRTGLSKDYPDTPEGNKALAAAIVKAFVTDRGVDGLDIDIEHEFTNKRTPEEDARALNVFKEIAQLIGKNGSDKSKLLIMDQTLSVENNPIFKGIAEDLDYLLRQYYGSQGGEAEVDTINSDWNQYQNYIDASQFMIGFSFFEESASKGNLWFDVNEYDPNNPEKGKDIEGTRAKKYAEWQPSTGGLKAGIFSYAIDRDGVAHVPSTYKNRTSTNLQRHEVDNISHTDYTVSRKLKTLMTEDKRYDVIDQKDIPDPALREQIIQQVGQYKGDLERYNKTLVLTGDKIQNLKGLEKLSKLQKLELRQLSNVKEITPELLPESMKKDAELVMVGMTGLEKLNLSGLNRQTLDGIDVNSITHLTSFDISHNSLDLSEKSEDRKLLMTLMEQVSNHQKITVKNTAFENQKPKGYYPQTYDTKEGHYDVDNAEHDILTDFVFGTVTKRNTFIGDEEAFAIYKEGAVDGRQYVSKDYTYEAFRKDYKGYKVHLTASNLGETVTSKVTATTDETYLVDVSDGEKVVHHMKLNIGSGAIMMENLAKGAKVIGTSGDFEQAKKIFDGEKSDRFFTWGQTNWIAFDLGEINLAKEWRLFNAETNTEIKTDSSLNVAKGRLQILKDTTIDLEKMDIKNRKEYLSNDENWTDVAQMDDAKAIFNSKLSNVLSRYWRFCVDGGASSYYPQYTELQILGQRLSNDVANTLKDAIAHMNDNVAWFKQAKYGMMIHWGLYSLLAGEYRGESSSAYAEWIQSKFQIPNAEYGNLATAFNPLYFDAKKIVALAKQCGMQYLVVTTKHHDGFAMYHSKVDAYNVYDATPFHRDIIGELAEACQKAGLKFGLYYSQDLDWHDPNGGGYKSNDVETAGTTWDNSWDFPDEDQKNFDLCFDNKILPQIKEIMSNYGDIATAWFDVPMTLSEAQSQTIYDTVRELQPNCLINSRLGNGKYDFVSLGDNEIPKNKEDMNKTDVDYNEITGFKPSPLGLYETAGTINDSWGFSYHDQNWKTPRTLYRYKQHLNDFGINYLLNVGLDPLGRVPMMAEENLLAAKALEDEANREF

SEQ ID NO: 89 - DNA, 2751 bp, Artificial Sequence
  SYNTHETIC FUSION PROTEN
atgggcagcagccatcatcatcatcatcacagcagcggcctggtgccgcgcggcagccatatgaacgacaacgtggcgtggttcaagcaggcgaaatatggcatgatgattcactggggtctgtacagcctgctggcgggcgagtatcgtggtgaaagcagcagcgcgtacgcggagtggatccagagcaagtttcaaattccgaacgcggaatacggcaacctggcgaccgcgttcaacccgctgtattttgatgcgaagaaaatcgttgcgctggcgaaacagtgcggcatgcaatacctggtggttaccaccaagcaccacgacggtttcgcgatgtatcacagcaaagtggacgcgtacaacgtttatgatgcgaccccgtttcaccgtgatatcattggcgagctggcggaagcgtgccagaaggcgggtctgaaattcggtctgtactatagccaagacctggattggcacgacccgaacggtggcggttataagagcaacgatgtggagaccgcgggtaccacctgggacaacagctgggatttcccggacgaagatcagaaaaacttcgacctgtgctttgataacaagatcctgccgcaaatcaaagagattatgagcaactacggtgacattgcgaccgcgtggtttgatgtgccgatgaccctgagcgaggcgcagagccaaaccatctatgacaccgttcgtgaactgcaaccgaactgcctgattaacagccgtctgggcaacggcaagtacgacttcgtgagcctgggcgataacgagatcccgaagaacaaagaagatatgaacaagaccgacgttgattacaacgagattaccggcttcaaaccgagcccgctgggcctgtatgaaaccgcgggtaccatcaacgacagctggggttttagctaccacgatcagaactggaagaccccgcgtaccctgtaccgttataaacaacacctgaacgactttggtattaactacctgctgaacgtgggcctggatccgctgggtcgtgttccgatgatggcggaggaaaacctgctggcggcgaaagcgctggaggacgaagcgaaccgtggatccaaagataagtcgtatgatctgattgatgagaaagatttcccagataaggctttgcgagaagctgtgatggcgcaggttggaaccagaaaaggtgatttggaacgtttcaatggcacattacgattggataatccagcgattcaaagtttagaaggtctaaataaatttaaaaaattagctcaattagacttgattggcttatctcgcattacaaagctcgaccgttctgttttacccgctaatatgaagccaggcaaagataccttggaaacagttcttgaaacctataaaaaggataacaaagaagaacctgctactatcccaccagtatctttgaaggtttctggtttaactggtctgaaagaattagatttgtcaggttttgaccgtgaaaccttggctggtcttgatgccgctactctaacgtctttagaaaaagttgatatttctggcaacaaacttgatttggctccaggaacagaaaatcgacaaatttttgatactatgctatcaactatcagcaatcatgttggaagcaatgaacaaacagtgaaatttgacaagcaaaaaccaactgggcattacccagatacctatgggaaaactagtctgcgcttaccagtggcaaatgaaaaagttgatttgcaaagccagcttttgtttgggactgtgacaaatcaaggaaccctaatcaatagcgaagcagactataaggcttaccaaaatcataaaattgctggacgtagctttgttgattcaaactatcattacaataactttaaagtttcttatgagaactataccgttaaagtaactgattccacattgggaaccactactgacaaaacgctagcaactgataaagaagagacctataaggttgacttctttagcccagcagataagacaaaagctgttcatactgctaaagtgattgttggtgacgaaaaaaccatgatggttaatttggcagaaggcgcaacagttattggaggaagtgctgatcctgtaaatgcaagaaaggtatttgatgggcaactgggcagtgagactgataatatctctttaggatgggattctaagcaaagtattatatttaaattgaaagaagatggattaataaagcattggcgtttcttcaatgattcagcccgaaatcctgagacaaccaataaacctattcaggaagcaagtctacaaatttttaatatcaaagattataatctagataatttgttggaaaatcccaataaatttgatgatgaaaaatattggattactgtagatacttacagtgcacaaggagagagagctactgcattcagtaatacattaaataatattactagtaaatattggcgagttgtctttgatactaaaggagatagatatagttcgccagtagtccctgaactccaaattttaggttatccgttacctaacgccgacactatcatgaaaacagtaactactgctaaagagttatctcaacaaaaagataagttttctcaaaagatgcttgatgagttaaaaataaaagagatggctttagaaacttctttgaacagtaagatttttgatgtaactgctattaatgctaatgctggagttttgaaagattgtattgagaaaaggcagctgctaaaaaaataa

SEQ ID NO: 90 - protein, 916 aa, Artificial Sequence
  SYNTHETIC FUSION PROTEN
MGSSHHHHHHSSGLVPRGSHMNDNVAWFKQAKYGMMIHWGLYSLLAGEYRGESSSAYAEWIQSKFQIPNAEYGNLATAFNPLYFDAKKIVALAKQCGMQYLVVTTKHHDGFAMYHSKVDAYNVYDATPFHRDIIGELAEACQKAGLKFGLYYSQDLDWHDPNGGGYKSNDVETAGTTWDNSWDFPDEDQKNFDLCFDNKILPQIKEIMSNYGDIATAWFDVPMTLSEAQSQTIYDTVRELQPNCLINSRLGNGKYDFVSLGDNEIPKNKEDMNKTDVDYNEITGFKPSPLGLYETAGTINDSWGFSYHDQNWKTPRTLYRYKQHLNDFGINYLLNVGLDPLGRVPMMAEENLLAAKALEDEANRGSKDKSYDLIDEKDFPDKALREAVMAQVGTRKGDLERFNGTLRLDNPAIQSLEGLNKFKKLAQLDLIGLSRITKLDRSVLPANMKPGKDTLETVLETYKKDNKEEPATIPPVSLKVSGLTGLKELDLSGFDRETLAGLDAATLTSLEKVDISGNKLDLAPGTENRQIFDTMLSTISNHVGSNEQTVKFDKQKPTGHYPDTYGKTSLRLPVANEKVDLQSQLLFGTVTNQGTLINSEADYKAYQNHKIAGRSFVDSNYHYNNFKVSYENYTVKVTDSTLGTTTDKTLATDKEETYKVDFFSPADKTKAVHTAKVIVGDEKTMMVNLAEGATVIGGSADPVNARKVFDGQLGSETDNISLGWDSKQSIIFKLKEDGLIKHWRFFNDSARNPETTNKPIQEASLQIFNIKDYNLDNLLENPNKFDDEKYWITVDTYSAQGERATAFSNTLNNITSKYWRVVFDTKGDRYSSPVVPELQILGYPLPNADTIMKTVTTAKELSQQKDKFSQKMLDELKIKEMALETSLNSKIFDVTAINANAGVLKDCIEKRQLLKK

SEQ ID NO: 91 - DNA, 2478 bp, Artificial Sequence
  SYNTHETIC FUSION PROTEN
atgggcagcagccatcatcatcatcatcacagcagcggcctggtgccgcgcggcagccatatgaacgacaacgtggcgtggttcaagcaggcgaaatatggcatgatgattcactggggtctgtacagcctgctggcgggcgagtatcgtggtgaaagcagcagcgcgtacgcggagtggatccagagcaagtttcaaattccgaacgcggaatacggcaacctggcgaccgcgttcaacccgctgtattttgatgcgaagaaaatcgttgcgctggcgaaacagtgcggcatgcaatacctggtggttaccaccaagcaccacgacggtttcgcgatgtatcacagcaaagtggacgcgtacaacgtttatgatgcgaccccgtttcaccgtgatatcattggcgagctggcggaagcgtgccagaaggcgggtctgaaattcggtctgtactatagccaagacctggattggcacgacccgaacggtggcggttataagagcaacgatgtggagaccgcgggtaccacctgggacaacagctgggatttcccggacgaagatcagaaaaacttcgacctgtgctttgataacaagatcctgccgcaaatcaaagagattatgagcaactacggtgacattgcgaccgcgtggtttgatgtgccgatgaccctgagcgaggcgcagagccaaaccatctatgacaccgttcgtgaactgcaaccgaactgcctgattaacagccgtctgggcaacggcaagtacgacttcgtgagcctgggcgataacgagatcccgaagaacaaagaagatatgaacaagaccgacgttgattacaacgagattaccggcttcaaaccgagcccgctgggcctgtatgaaaccgcgggtaccatcaacgacagctggggttttagctaccacgatcagaactggaagaccccgcgtaccctgtaccgttataaacaacacctgaacgactttggtattaactacctgctgaacgtgggcctggatccgctgggtcgtgttccgatgatggcggaggaaaacctgctggcggcgaaagcgctggaggacgaagcgaaccgtggatccaccgaagacaaacgctatgatgtcattgatcaaaaagacattcctgacccagcattaagagaacaaatcattcaacaagttggacagtataaaggcgatttggaacgttataacaagacattggtgcttacaggagataagattcaaaatcttaaaggactagaaaaattaagcaagttacaaaaattagagttgcgccagctatctaacgttaaagaaattactccagaacttttgccggaaagcatgaaaaaagatgctgagcttgttatggtaggcatgactggtttagaaaaactaaaccttagtggtctaaatcgtcaaactttagacggtatagacgtgaatagtattacgcatttgacatcatttgatatttcacataatagtttggacttgtcggaaaagagtgaagaccgtaaactattaatgactttgatggagcaggtttcaaatcatcaaaaaataacggtgaaaaatacggcttttgaaaatcaaaaaccgaaaggttattatcctcagacgtatgataccaaagaaggtcattatgatgttgataatgcagaacatgatattttaactgattttgtttttggaactgttactaaacgtaatacctttattggagacgaagaagcatttgctatctataaagaaggagctgtcgatggtcgacaatatgtgtctaaagactatacttatgaagcttttcgtaaagactataaaggttacaaggttcatttaactgcttctaacctaggagaaacagttacttctaaggtaactgctactactgatgaaacttacttagtagatgtttctgatggggaaaaagttgttcaccacatgaaactcaatataggatctggtgccatcatgatggaaaatctggcaaaaggggctaaagtgattggtacatctggggactttgagcaagcaaagaagattttcgatggtgaaaagtcagatagattcttcacttggggacaaactaactggatagcttttgatctaggagaaattaatcttgcgaaggaatggcgtttatttaatgcagagacaaatactgaaataaagacagatagtagcttaaacgtggctaaaggacgtcttcagattttaaaagatacaactattgatttagaaaaaatggacataaaaaatcgtaaagagtatctgtcgaatgatgaaaattggactgatgttgctcagatggatgatgcaaaagcgatatttaatagtaaattatccaatgttttatctcggtattggcggttttgtgtagatggtggagctagctcttattaccctcaatataccgaacttcaaatcctcggacaacgtttatcaaatgatgtcgctaatacgctgaaggattaa

SEQ ID NO: 92 - protein, 825 aa, Artificial Sequence
  SYNTHETIC FUSION PROTEN
MGSSHHHHHHSSGLVPRGSHMNDNVAWFKQAKYGMMIHWGLYSLLAGEYRGESSSAYAEWIQSKFQIPNAEYGNLATAFNPLYFDAKKIVALAKQCGMQYLVVTTKHHDGFAMYHSKVDAYNVYDATPFHRDIIGELAEACQKAGLKFGLYYSQDLDWHDPNGGGYKSNDVETAGTTWDNSWDFPDEDQKNFDLCFDNKILPQIKEIMSNYGDIATAWFDVPMTLSEAQSQTIYDTVRELQPNCLINSRLGNGKYDFVSLGDNEIPKNKEDMNKTDVDYNEITGFKPSPLGLYETAGTINDSWGFSYHDQNWKTPRTLYRYKQHLNDFGINYLLNVGLDPLGRVPMMAEENLLAAKALEDEANRGSTEDKRYDVIDQKDIPDPALREQIIQQVGQYKGDLERYNKTLVLTGDKIQNLKGLEKLSKLQKLELRQLSNVKEITPELLPESMKKDAELVMVGMTGLEKLNLSGLNRQTLDGIDVNSITHLTSFDISHNSLDLSEKSEDRKLLMTLMEQVSNHQKITVKNTAFENQKPKGYYPQTYDTKEGHYDVDNAEHDILTDFVFGTVTKRNTFIGDEEAFAIYKEGAVDGRQYVSKDYTYEAFRKDYKGYKVHLTASNLGETVTSKVTATTDETYLVDVSDGEKVVHHMKLNIGSGAIMMENLAKGAKVIGTSGDFEQAKKIFDGEKSDRFFTWGQTNWIAFDLGEINLAKEWRLFNAETNTEIKTDSSLNVAKGRLQILKDTTIDLEKMDIKNRKEYLSNDENWTDVAQMDDAKAIFNSKLSNVLSRYWRFCVDGGASSYYPQYTELQILGQRLSNDVANTLKD

SEQ ID NO: 93 - DNA, 4011 bp, Artificial Sequence
  SYNTHETIC FUSION PROTEN
atgggcagcagccatcatcatcatcatcacagcagcggcctggtgccgcgcggcagccatatgaacgacaacgtggcgtggttcaagcaggcgaaatatggcatgatgattcactggggtctgtacagcctgctggcgggcgagtatcgtggtgaaagcagcagcgcgtacgcggagtggatccagagcaagtttcaaattccgaacgcggaatacggcaacctggcgaccgcgttcaacccgctgtattttgatgcgaagaaaatcgttgcgctggcgaaacagtgcggcatgcaatacctggtggttaccaccaagcaccacgacggtttcgcgatgtatcacagcaaagtggacgcgtacaacgtttatgatgcgaccccgtttcaccgtgatatcattggcgagctggcggaagcgtgccagaaggcgggtctgaaattcggtctgtactatagccaagacctggattggcacgacccgaacggtggcggttataagagcaacgatgtggagaccgcgggtaccacctgggacaacagctgggatttcccggacgaagatcagaaaaacttcgacctgtgctttgataacaagatcctgccgcaaatcaaagagattatgagcaactacggtgacattgcgaccgcgtggtttgatgtgccgatgaccctgagcgaggcgcagagccaaaccatctatgacaccgttcgtgaactgcaaccgaactgcctgattaacagccgtctgggcaacggcaagtacgacttcgtgagcctgggcgataacgagatcccgaagaacaaagaagatatgaacaagaccgacgttgattacaacgagattaccggcttcaaaccgagcccgctgggcctgtatgaaaccgcgggtaccatcaacgacagctggggttttagctaccacgatcagaactggaagaccccgcgtaccctgtaccgttataaacaacacctgaacgactttggtattaactacctgctgaacgtgggcctggatccgctgggtcgtgttccgatgatggcggaggaaaacctgctggcggcgaaagcgctggaggacgaagcgaaccgtggatccacccaccatgattcactcaatactgtaaaagcggaggagaagactgttcaggttcagaaaggattaccttctatcgatagcttgcattatctgtcagagaatagcaaaaaagaatttaaagaagaactctcaaaagcggggcaagaatctcaaaaggtcaaagagatattagcaaaagctcagcaggcagataaacaagctcaagaacttgccaaaatgaaaattcctgagaaaataccgatgaaaccgttacatggttctctctacggtggttactttagaacttggcatgacaaaacatcagatccaacagaaaaagacaaagttaactcgatgggagagcttcctaaagaagtagatctagcctttattttccacgattggacaaaagattatagccttttttggaaagaattggccaccaaacatgtgccaaagttaaacaagcaagggacacgtgtcattcgtaccattccatggcgtttcctagctgggggtgataacagtggtattgcagaagataccagtaaatacccaaatacaccagagggaaataaagctttagccaaagctattgttgatgaatatgtttataaatacaaccttgatggcttagatgtggatgttgaacatgatagtattccaaaagttgacaaaaaagaagatacagcaggcgtagaacgctctattcaagtgtttgaagaaattgggaaattaattggaccaaaaggtgttgataaatcgcggttatttattatggatagcacctacatggctgataaaaacccattgattgagcgaggagctccttatattaatttattactggtacaggtctatggttcacaaggagagaaaggtggttgggagcctgtttctaatcgacctgaaaaaacaatggaagaacgatggcaaggttatagcaagtatattcgtcctgaacaatacatgattggtttttctttctatgaggaaaatgctcaagaagggaatctttggtatgatattaattctcgcaaggacgaggacaaagcaaatggaattaacactgacataactggaacgcgtgccgaacggtatgcaaggtggcaacctaagacaggtggggttaagggaggtatcttctcctacgctattgaccgagatggtgtagctcatcaacctaaaaaatatgctaaacagaaagagtttaaggacgcaactgataacatcttccactcagattatagtgtctccaaggcattaaagacagttatgctaaaagataagtcgtatgatctgattgatgagaaagatttcccagataaggctttgcgagaagctgtgatggcgcaggttggaaccagaaaaggtgatttggaacgtttcaatggcacattacgattggataatccagcgattcaaagtttagaaggtctaaataaatttaaaaaattagctcaattagacttgattggcttatctcgcattacaaagctcgaccgttctgttttacccgctaatatgaagccaggcaaagataccttggaaacagttcttgaaacctataaaaaggataacaaagaagaacctgctactatcccaccagtatctttgaaggtttctggtttaactggtctgaaagaattagatttgtcaggttttgaccgtgaaaccttggctggtcttgatgccgctactctaacgtctttagaaaaagttgatatttctggcaacaaacttgatttggctccaggaacagaaaatcgacaaatttttgatactatgctatcaactatcagcaatcatgttggaagcaatgaacaaacagtgaaatttgacaagcaaaaaccaactgggcattacccagatacctatgggaaaactagtctgcgcttaccagtggcaaatgaaaaagttgatttgcaaagccagcttttgtttgggactgtgacaaatcaaggaaccctaatcaatagcgaagcagactataaggcttaccaaaatcataaaattgctggacgtagctttgttgattcaaactatcattacaataactttaaagtttcttatgagaactataccgttaaagtaactgattccacattgggaaccactactgacaaaacgctagcaactgataaagaagagacctataaggttgacttctttagcccagcagataagacaaaagctgttcatactgctaaagtgattgttggtgacgaaaaaaccatgatggttaatttggcagaaggcgcaacagttattggaggaagtgctgatcctgtaaatgcaagaaaggtatttgatgggcaactgggcagtgagactgataatatctctttaggatgggattctaagcaaagtattatatttaaattgaaagaagatggattaataaagcattggcgtttcttcaatgattcagcccgaaatcctgagacaaccaataaacctattcaggaagcaagtctacaaatttttaatatcaaagattataatctagataatttgttggaaaatcccaataaatttgatgatgaaaaatattggattactgtagatacttacagtgcacaaggagagagagctactgcattcagtaatacattaaataatattactagtaaatattggcgagttgtctttgatactaaaggagatagatatagttcgccagtagtccctgaactccaaattttaggttatccgttacctaacgccgacactatcatgaaaacagtaactactgctaaagagttatctcaacaaaaagataagttttctcaaaagatgcttgatgagttaaaaataaaagagatggctttagaaacttctttgaacagtaagatttttgatgtaactgctattaatgctaatgctggagttttgaaagattgtattgagaaaaggcagctgctaaaaaaataa

SEQ ID NO: 94 - protein, 1336 aa, Artificial Sequence
  SYNTHETIC FUSION PROTEN
MGSSHHHHHHSSGLVPRGSHMNDNVAWFKQAKYGMMIHWGLYSLLAGEYRGESSSAYAEWIQSKFQIPNAEYGNLATAFNPLYFDAKKIVALAKQCGMQYLVVTTKHHDGFAMYHSKVDAYNVYDATPFHRDIIGELAEACQKAGLKFGLYYSQDLDWHDPNGGGYKSNDVETAGTTWDNSWDFPDEDQKNFDLCFDNKILPQIKEIMSNYGDIATAWFDVPMTLSEAQSQTIYDTVRELQPNCLINSRLGNGKYDFVSLGDNEIPKNKEDMNKTDVDYNEITGFKPSPLGLYETAGTINDSWGFSYHDQNWKTPRTLYRYKQHLNDFGINYLLNVGLDPLGRVPMMAEENLLAAKALEDEANRGSTHHDSLNTVKAEEKTVQVQKGLPSIDSLHYLSENSKKEFKEELSKAGQESQKVKEILAKAQQADKQAQELAKMKIPEKIPMKPLHGSLYGGYFRTWHDKTSDPTEKDKVNSMGELPKEVDLAFIFHDWTKDYSLFWKELATKHVPKLNKQGTRVIRTIPWRFLAGGDNSGIAEDTSKYPNTPEGNKALAKAIVDEYVYKYNLDGLDVDVEHDSIPKVDKKEDTAGVERSIQVFEEIGKLIGPKGVDKSRLFIMDSTYMADKNPLIERGAPYINLLLVQVYGSQGEKGGWEPVSNRPEKTMEERWQGYSKYIRPEQYMIGFSFYEENAQEGNLWYDINSRKDEDKANGINTDITGTRAERYARWQPKTGGVKGGIFSYAIDRDGVAHQPKKYAKQKEFKDATDNIFHSDYSVSKALKTVMLKDKSYDLIDEKDFPDKALREAVMAQVGTRKGDLERFNGTLRLDNPAIQSLEGLNKFKKLAQLDLIGLSRITKLDRSVLPANMKPGKDTLETVLETYKKDNKEEPATIPPVSLKVSGLTGLKELDLSGFDRETLAGLDAATLTSLEKVDISGNKLDLAPGTENRQIFDTMLSTISNHVGSNEQTVKFDKQKPTGHYPDTYGKTSLRLPVANEKVDLQSQLLFGTVTNQGTLINSEADYKAYQNHKIAGRSFVDSNYHYNNFKVSYENYTVKVTDSTLGTTTDKTLATDKEETYKVDFFSPADKTKAVHTAKVIVGDEKTMMVNLAEGATVIGGSADPVNARKVFDGQLGSETDNISLGWDSKQSIIFKLKEDGLIKHWRFFNDSARNPETTNKPIQEASLQIFNIKDYNLDNLLENPNKFDDEKYWITVDTYSAQGERATAFSNTLNNITSKYWRVVFDTKGDRYSSPVVPELQILGYPLPNADTIMKTVTTAKELSQQKDKFSQKMLDELKIKEMALETSLNSKIFDVTAINANAGVLKDCIEKRQLLKK

SEQ ID NO: 95 - DNA, 4011 bp, Artificial Sequence
  SYNTHETIC FUSION PROTEN
atgggcagcagccatcatcatcatcatcacagcagcggcctggtgccgcgcggcagccatatgaacgacaacgtggcgtggttcaagcaggcgaaatatggcatgatgattcactggggtctgtacagcctgctggcgggcgagtatcgtggtgaaagcagcagcgcgtacgcggagtggatccagagcaagtttcaaattccgaacgcggaatacggcaacctggcgaccgcgttcaacccgctgtattttgatgcgaagaaaatcgttgcgctggcgaaacagtgcggcatgcaatacctggtggttaccaccaagcaccacgacggtttcgcgatgtatcacagcaaagtggacgcgtacaacgtttatgatgcgaccccgtttcaccgtgatatcattggcgagctggcggaagcgtgccagaaggcgggtctgaaattcggtctgtactatagccaagacctggattggcacgacccgaacggtggcggttataagagcaacgatgtggagaccgcgggtaccacctgggacaacagctgggatttcccggacgaagatcagaaaaacttcgacctgtgctttgataacaagatcctgccgcaaatcaaagagattatgagcaactacggtgacattgcgaccgcgtggtttgatgtgccgatgaccctgagcgaggcgcagagccaaaccatctatgacaccgttcgtgaactgcaaccgaactgcctgattaacagccgtctgggcaacggcaagtacgacttcgtgagcctgggcgataacgagatcccgaagaacaaagaagatatgaacaagaccgacgttgattacaacgagattaccggcttcaaaccgagcccgctgggcctgtatgaaaccgcgggtaccatcaacgacagctggggttttagctaccacgatcagaactggaagaccccgcgtaccctgtaccgttataaacaacacctgaacgactttggtattaactacctgctgaacgtgggcctggatccgctgggtcgtgttccgatgatggcggaggaaaacctgctggcggcgaaagcgctggaggacgaagcgaaccgtggatccacccaccatgattcactcaatactgtaaaagcggaggagaagactgttcaggttcagaaaggattaccttctatcgatagcttgcattatctgtcagagaatagcaaaaaagaatttaaagaagaactctcaaaagcggggcaagaatctcaaaaggtcaaagagatattagcaaaagctcagcaggcagataaacaagctcaagaacttgccaaaatgaaaattcctgagaaaataccgatgaaaccgttacatggttctctctacggtggttactttagaacttggcatgacaaaacatcagatccaacagaaaaagacaaagttaactcgatgggagagcttcctaaagaagtagatctagcctttattttccacgattggacaaaagattatagccttttttggaaagaattggccaccaaacatgtgccaaagttaaacaagcaagggacacgtgtcattcgtaccattccatggcgtttcctagctgggggtgataacagtggtattgcagaagataccagtaaatacccaaatacaccagagggaaataaagctttagccaaagctattgttgatgaatatgtttataaatacaaccttgatggcttagatgtgcaggttgaacatgatagtattccaaaagttgacaaaaaagaagatacagcaggcgtagaacgctctattcaagtgtttgaagaaattgggaaattaattggaccaaaaggtgttgataaatcgcggttatttattatggatagcacctacatggctgataaaaacccattgattgagcgaggagctccttatattaatttattactggtacaggtctatggttcacaaggagagaaaggtggttgggagcctgtttctaatcgacctgaaaaaacaatggaagaacgatggcaaggttatagcaagtatattcgtcctgaacaatacatgattggtttttctttctatgaggaaaatgctcaagaagggaatctttggtatgatattaattctcgcaaggacgaggacaaagcaaatggaattaacactgacataactggaacgcgtgccgaacggtatgcaaggtggcaacctaagacaggtggggttaagggaggtatcttctcctacgctattgaccgagatggtgtagctcatcaacctaaaaaatatgctaaacagaaagagtttaaggacgcaactgataacatcttccactcagattatagtgtctccaaggcattaaagacagttatgctaaaagataagtcgtatgatctgattgatgagaaagatttcccagataaggctttgcgagaagctgtgatggcgcaggttggaaccagaaaaggtgatttggaacgtttcaatggcacattacgattggataatccagcgattcaaagtttagaaggtctaaataaatttaaaaaattagctcaattagacttgattggcttatctcgcattacaaagctcgaccgttctgttttacccgctaatatgaagccaggcaaagataccttggaaacagttcttgaaacctataaaaaggataacaaagaagaacctgctactatcccaccagtatctttgaaggtttctggtttaactggtctgaaagaattagatttgtcaggttttgaccgtgaaaccttggctggtcttgatgccgctactctaacgtctttagaaaaagttgatatttctggcaacaaacttgatttggctccaggaacagaaaatcgacaaatttttgatactatgctatcaactatcagcaatcatgttggaagcaatgaacaaacagtgaaatttgacaagcaaaaaccaactgggcattacccagatacctatgggaaaactagtctgcgcttaccagtggcaaatgaaaaagttgatttgcaaagccagcttttgtttgggactgtgacaaatcaaggaaccctaatcaatagcgaagcagactataaggcttaccaaaatcataaaattgctggacgtagctttgttgattcaaactatcattacaataactttaaagtttcttatgagaactataccgttaaagtaactgattccacattgggaaccactactgacaaaacgctagcaactgataaagaagagacctataaggttgacttctttagcccagcagataagacaaaagctgttcatactgctaaagtgattgttggtgacgaaaaaaccatgatggttaatttggcagaaggcgcaacagttattggaggaagtgctgatcctgtaaatgcaagaaaggtatttgatgggcaactgggcagtgagactgataatatctctttaggatgggattctaagcaaagtattatatttaaattgaaagaagatggattaataaagcattggcgtttcttcaatgattcagcccgaaatcctgagacaaccaataaacctattcaggaagcaagtctacaaatttttaatatcaaagattataatctagataatttgttggaaaatcccaataaatttgatgatgaaaaatattggattactgtagatacttacagtgcacaaggagagagagctactgcattcagtaatacattaaataatattactagtaaatattggcgagttgtctttgatactaaaggagatagatatagttcgccagtagtccctgaactccaaattttaggttatccgttacctaacgccgacactatcatgaaaacagtaactactgctaaagagttatctcaacaaaaagataagttttctcaaaagatgcttgatgagttaaaaataaaagagatggctttagaaacttctttgaacagtaagatttttgatgtaactgctattaatgctaatgctggagttttgaaagattgtattgagaaaaggcagctgctaaaaaaataa

SEQ ID NO: 96 - protein, 1336 aa, Artificial Sequence
  SYNTHETIC FUSION PROTEN
MGSSHHHHHHSSGLVPRGSHMNDNVAWFKQAKYGMMIHWGLYSLLAGEYRGESSSAYAEWIQSKFQIPNAEYGNLATAFNPLYFDAKKIVALAKQCGMQYLVVTTKHHDGFAMYHSKVDAYNVYDATPFHRDIIGELAEACQKAGLKFGLYYSQDLDWHDPNGGGYKSNDVETAGTTWDNSWDFPDEDQKNFDLCFDNKILPQIKEIMSNYGDIATAWFDVPMTLSEAQSQTIYDTVRELQPNCLINSRLGNGKYDFVSLGDNEIPKNKEDMNKTDVDYNEITGFKPSPLGLYETAGTINDSWGFSYHDQNWKTPRTLYRYKQHLNDFGINYLLNVGLDPLGRVPMMAEENLLAAKALEDEANRGSTHHDSLNTVKAEEKTVQVQKGLPSIDSLHYLSENSKKEFKEELSKAGQESQKVKEILAKAQQADKQAQELAKMKIPEKIPMKPLHGSLYGGYFRTWHDKTSDPTEKDKVNSMGELPKEVDLAFIFHDWTKDYSLFWKELATKHVPKLNKQGTRVIRTIPWRFLAGGDNSGIAEDTSKYPNTPEGNKALAKAIVDEYVYKYNLDGLDVQVEHDSIPKVDKKEDTAGVERSIQVFEEIGKLIGPKGVDKSRLFIMDSTYMADKNPLIERGAPYINLLLVQVYGSQGEKGGWEPVSNRPEKTMEERWQGYSKYIRPEQYMIGFSFYEENAQEGNLWYDINSRKDEDKANGINTDITGTRAERYARWQPKTGGVKGGIFSYAIDRDGVAHQPKKYAKQKEFKDATDNIFHSDYSVSKALKTVMLKDKSYDLIDEKDFPDKALREAVMAQVGTRKGDLERFNGTLRLDNPAIQSLEGLNKFKKLAQLDLIGLSRITKLDRSVLPANMKPGKDTLETVLETYKKDNKEEPATIPPVSLKVSGLTGLKELDLSGFDRETLAGLDAATLTSLEKVDISGNKLDLAPGTENRQIFDTMLSTISNHVGSNEQTVKFDKQKPTGHYPDTYGKTSLRLPVANEKVDLQSQLLFGTVTNQGTLINSEADYKAYQNHKIAGRSFVDSNYHYNNFKVSYENYTVKVTDSTLGTTTDKTLATDKEETYKVDFFSPADKTKAVHTAKVIVGDEKTMMVNLAEGATVIGGSADPVNARKVFDGQLGSETDNISLGWDSKQSIIFKLKEDGLIKHWRFFNDSARNPETTNKPIQEASLQIFNIKDYNLDNLLENPNKFDDEKYWITVDTYSAQGERATAFSNTLNNITSKYWRVVFDTKGDRYSSPVVPELQILGYPLPNADTIMKTVTTAKELSQQKDKFSQKMLDELKIKEMALETSLNSKIFDVTAINANAGVLKDCIEKRQLLKK

SEQ ID NO: 97 - DNA, 3552 bp, Artificial Sequence
  SYNTHETIC FUSION PROTEN
atgggcagcagccatcatcaccatcaccatgagctccccgggccgcgggaaaacctgtattttcagggagcgatcgctcatatgaacgacaacgtggcgtggttcaagcaggcgaaatatggcatgatgattcactggggtctgtacagcctgctggcgggcgagtatcgtggtgaaagcagcagcgcgtacgcggagtggatccagagcaagtttcaaattccgaacgcggaatacggcaacctggcgaccgcgttcaacccgctgtattttgatgcgaagaaaatcgttgcgctggcgaaacagtgcggcatgcaatacctggtggttaccaccaagcaccacgacggtttcgcgatgtatcacagcaaagtggacgcgtacaacgtttatgatgcgaccccgtttcaccgtgatatcattggcgagctggcggaagcgtgccagaaggcgggtctgaaattcggtctgtactatagccaagacctggattggcacgacccgaacggtggcggttataagagcaacgatgtggagaccgcgggtaccacctgggacaacagctgggatttcccggacgaagatcagaaaaacttcgacctgtgctttgataacaagatcctgccgcaaatcaaagagattatgagcaactacggtgacattgcgaccgcgtggtttgatgtgccgatgaccctgagcgaggcgcagagccaaaccatctatgacaccgttcgtgaactgcaaccgaactgcctgattaacagccgtctgggcaacggcaagtacgacttcgtgagcctgggcgataacgagatcccgaagaacaaagaagatatgaacaagaccgacgttgattacaacgagattaccggcttcaaaccgagcccgctgggcctgtatgaaaccgcgggtaccatcaacgacagctggggttttagctaccacgatcagaactggaagaccccgcgtaccctgtaccgttataaacaacacctgaacgactttggtattaactacctgctgaacgtgggcctggatccgctgggtcgtgttccgatgatggcggaggaaaacctgctggcggcgaaagcgctggaggacgaagcgaaccgtgaattcgaggagaagactgttcaaacaggaaagacagatcagcaggttggtgctaaattggtacaggaaatccgtgaaggaaaacgcggaccactatatgctggttattttaggacatggcatgatcgtgcttcaacaggaatagatggtaaacagcaacatccagaaaatactatggctgaggtcccaaaagaagttgatatcttatttgtttttcatgaccatacagcttcagatagtccattttggtctgaattaaaggacagttatgtccataaattacatcaacagggaacggcacttgttcagacaattggtgttaacgaattaaatggacgtacaggtttatctaaagattatcctgatactcctgaggggaacaaagctttagcagcagccattgtcaaggcatttgtaactgatcgtggtgtcgatggactagatattgatattgagcacgaatttacgaacaaaagaacacctgaagaagatgctcgtgctctaaatgtttttaaagagattgcgcagttaataggtaaaaatggtagtgataaatctaaattgctcatcatggacactaccctaagtgttgaaaataatccaatatttaaagggatagcggaagatcttgattatcttcttagacaatattatggttcacaaggtggagaagctgaagtggatactataaactctgattggaaccaatatcagaattatattgatgctagccagttcatgattggattctccttttttgaagaatctgcgtccaaagggaatttatggtttgatgttaacgaatacgaccctaacaatcctgaaaaagggaaagatattgaaggaacacgtgctaaaaaatatgcagagtggcaacctagtacaggtggtttaaaagcaggtatattctcttatgctattgatcgtgatggagtggctcatgttccttcaacatataaaaataggactagtacaaatttacaacggcatgaagtcgataatatctcacatactgactacaccgtatctcgaaaattaaaaacattgatgaccgaagacaaacgctatgatgtcattgatcaaaaagacattcctgacccagcattaagagaacaaatcattcaacaagttggacagtataaaggcgatttggaacgttataacaagacattggtgcttacaggagataagattcaaaatcttaaaggactagaaaaattaagcaagttacaaaaattagagttgcgccagctatctaacgttaaagaaattactccagaacttttgccggaaagcatgaaaaaagatgctgagcttgttatggtaggcatgactggtttagaaaaactaaaccttagtggtctaaatcgtcaaactttagacggtatagacgtgaatagtattacgcatttgacatcatttgatatttcacataatagtttggacttgtcggaaaagagtgaagaccgtaaactattaatgactttgatggagcaggtttcaaatcatcaaaaaataacggtgaaaaatacggcttttgaaaatcaaaaaccgaaaggttattatcctcagacgtatgataccaaagaaggtcattatgatgttgataatgcagaacatgatattttaactgattttgtttttggaactgttactaaacgtaatacctttattggagacgaagaagcatttgctatctataaagaaggagctgtcgatggtcgacaatatgtgtctaaagactatacttatgaagcttttcgtaaagactataaaggttacaaggttcatttaactgcttctaacctaggagaaacagttacttctaaggtaactgctactactgatgaaacttacttagtagatgtttctgatggggaaaaagttgttcaccacatgaaactcaatataggatctggtgccatcatgatggaaaatctggcaaaaggggctaaagtgattggtacatctggggactttgagcaagcaaagaagattttcgatggtgaaaagtcagatagattcttcacttggggacaaactaactggatagcttttgatctaggagaaattaatcttgcgaaggaatggcgtttatttaatgcagagacaaatactgaaataaagacagatagtagcttaaacgtggctaaaggacgtcttcagattttaaaagatacaactattgatttagaaaaaatggacataaaaaatcgtaaagagtatctgtcgaatgatgaaaattggactgatgttgctcagatggatgatgcaaaagcgatatttaatagtaaattatccaatgttttatctcggtattggcggttttgtgtagatggtggagctagctcttattaccctcaatataccgaacttcaaatcctcggacaacgtttatcaaatgatgtcgctaatacgctgaaggatgcgatcgcttaa

SEQ ID NO: 98 - protein, 1183 aa, Artificial Sequence
  SYNTHETIC FUSION PROTEN
MGSSHHHHHHELPGPRENLYFQGAIAHMNDNVAWFKQAKYGMMIHWGLYSLLAGEYRGESSSAYAEWIQSKFQIPNAEYGNLATAFNPLYFDAKKIVALAKQCGMQYLVVTTKHHDGFAMYHSKVDAYNVYDATPFHRDIIGELAEACQKAGLKFGLYYSQDLDWHDPNGGGYKSNDVETAGTTWDNSWDFPDEDQKNFDLCFDNKILPQIKEIMSNYGDIATAWFDVPMTLSEAQSQTIYDTVRELQPNCLINSRLGNGKYDFVSLGDNEIPKNKEDMNKTDVDYNEITGFKPSPLGLYETAGTINDSWGFSYHDQNWKTPRTLYRYKQHLNDFGINYLLNVGLDPLGRVPMMAEENLLAAKALEDEANREFEEKTVQTGKTDQQVGAKLVQEIREGKRGPLYAGYFRTWHDRASTGIDGKQQHPENTMAEVPKEVDILFVFHDHTASDSPFWSELKDSYVHKLHQQGTALVQTIGVNELNGRTGLSKDYPDTPEGNKALAAAIVKAFVTDRGVDGLDIDIEHEFTNKRTPEEDARALNVFKEIAQLIGKNGSDKSKLLIMDTTLSVENNPIFKGIAEDLDYLLRQYYGSQGGEAEVDTINSDWNQYQNYIDASQFMIGFSFFEESASKGNLWFDVNEYDPNNPEKGKDIEGTRAKKYAEWQPSTGGLKAGIFSYAIDRDGVAHVPSTYKNRTSTNLQRHEVDNISHTDYTVSRKLKTLMTEDKRYDVIDQKDIPDPALREQIIQQVGQYKGDLERYNKTLVLTGDKIQNLKGLEKLSKLQKLELRQLSNVKEITPELLPESMKKDAELVMVGMTGLEKLNLSGLNRQTLDGIDVNSITHLTSFDISHNSLDLSEKSEDRKLLMTLMEQVSNHQKITVKNTAFENQKPKGYYPQTYDTKEGHYDVDNAEHDILTDFVFGTVTKRNTFIGDEEAFAIYKEGAVDGRQYVSKDYTYEAFRKDYKGYKVHLTASNLGETVTSKVTATTDETYLVDVSDGEKVVHHMKLNIGSGAIMMENLAKGAKVIGTSGDFEQAKKIFDGEKSDRFFTWGQTNWIAFDLGEINLAKEWRLFNAETNTEIKTDSSLNVAKGRLQILKDTTIDLEKMDIKNRKEYLSNDENWTDVAQMDDAKAIFNSKLSNVLSRYWRFCVDGGASSYYPQYTELQILGQRLSNDVANTLKDAIA

SEQ ID NO: 99 - DNA, 3552 bp, Artificial Sequence
  SYNTHETIC FUSION PROTEN
atgggcagcagccatcatcaccatcaccatgagctccccgggccgcgggaaaacctgtattttcagggagcgatcgctcatatgaacgacaacgtggcgtggttcaagcaggcgaaatatggcatgatgattcactggggtctgtacagcctgctggcgggcgagtatcgtggtgaaagcagcagcgcgtacgcggagtggatccagagcaagtttcaaattccgaacgcggaatacggcaacctggcgaccgcgttcaacccgctgtattttgatgcgaagaaaatcgttgcgctggcgaaacagtgcggcatgcaatacctggtggttaccaccaagcaccacgacggtttcgcgatgtatcacagcaaagtggacgcgtacaacgtttatgatgcgaccccgtttcaccgtgatatcattggcgagctggcggaagcgtgccagaaggcgggtctgaaattcggtctgtactatagccaagacctggattggcacgacccgaacggtggcggttataagagcaacgatgtggagaccgcgggtaccacctgggacaacagctgggatttcccggacgaagatcagaaaaacttcgacctgtgctttgataacaagatcctgccgcaaatcaaagagattatgagcaactacggtgacattgcgaccgcgtggtttgatgtgccgatgaccctgagcgaggcgcagagccaaaccatctatgacaccgttcgtgaactgcaaccgaactgcctgattaacagccgtctgggcaacggcaagtacgacttcgtgagcctgggcgataacgagatcccgaagaacaaagaagatatgaacaagaccgacgttgattacaacgagattaccggcttcaaaccgagcccgctgggcctgtatgaaaccgcgggtaccatcaacgacagctggggttttagctaccacgatcagaactggaagaccccgcgtaccctgtaccgttataaacaacacctgaacgactttggtattaactacctgctgaacgtgggcctggatccgctgggtcgtgttccgatgatggcggaggaaaacctgctggcggcgaaagcgctggaggacgaagcgaaccgtgaattcgaggagaagactgttcaaacaggaaagacagatcagcaggttggtgctaaattggtacaggaaatccgtgaaggaaaacgcggaccactatatgctggttattttaggacatggcatgatcgtgcttcaacaggaatagatggtaaacagcaacatccagaaaatactatggctgaggtcccaaaagaagttgatatcttatttgtttttcatgaccatacagcttcagatagtccattttggtctgaattaaaggacagttatgtccataaattacatcaacagggaacggcacttgttcagacaattggtgttaacgaattaaatggacgtacaggtttatctaaagattatcctgatactcctgaggggaacaaagctttagcagcagccattgtcaaggcatttgtaactgatcgtggtgtcgatggactagatattatgattgagcacgaatttacgaacaaaagaacacctgaagaagatgctcgtgctctaaatgtttttaaagagattgcgcagttaataggtaaaaatggtagtgataaatctaaattgctcatcatggacactaccctaagtgttgaaaataatccaatatttaaagggatagcggaagatcttgattatcttcttagacaatattatggttcacaaggtggagaagctgaagtggatactataaactctgattggaaccaatatcagaattatattgatgctagccagttcatgattggattctccttttttgaagaatctgcgtccaaagggaatttatggtttgatgttaacgaatacgaccctaacaatcctgaaaaagggaaagatattgaaggaacacgtgctaaaaaatatgcagagtggcaacctagtacaggtggtttaaaagcaggtatattctcttatgctattgatcgtgatggagtggctcatgttccttcaacatataaaaataggactagtacaaatttacaacggcatgaagtcgataatatctcacatactgactacaccgtatctcgaaaattaaaaacattgatgaccgaagacaaacgctatgatgtcattgatcaaaaagacattcctgacccagcattaagagaacaaatcattcaacaagttggacagtataaaggcgatttggaacgttataacaagacattggtgcttacaggagataagattcaaaatcttaaaggactagaaaaattaagcaagttacaaaaattagagttgcgccagctatctaacgttaaagaaattactccagaacttttgccggaaagcatgaaaaaagatgctgagcttgttatggtaggcatgactggtttagaaaaactaaaccttagtggtctaaatcgtcaaactttagacggtatagacgtgaatagtattacgcatttgacatcatttgatatttcacataatagtttggacttgtcggaaaagagtgaagaccgtaaactattaatgactttgatggagcaggtttcaaatcatcaaaaaataacggtgaaaaatacggcttttgaaaatcaaaaaccgaaaggttattatcctcagacgtatgataccaaagaaggtcattatgatgttgataatgcagaacatgatattttaactgattttgtttttggaactgttactaaacgtaatacctttattggagacgaagaagcatttgctatctataaagaaggagctgtcgatggtcgacaatatgtgtctaaagactatacttatgaagcttttcgtaaagactataaaggttacaaggttcatttaactgcttctaacctaggagaaacagttacttctaaggtaactgctactactgatgaaacttacttagtagatgtttctgatggggaaaaagttgttcaccacatgaaactcaatataggatctggtgccatcatgatggaaaatctggcaaaaggggctaaagtgattggtacatctggggactttgagcaagcaaagaagattttcgatggtgaaaagtcagatagattcttcacttggggacaaactaactggatagcttttgatctaggagaaattaatcttgcgaaggaatggcgtttatttaatgcagagacaaatactgaaataaagacagatagtagcttaaacgtggctaaaggacgtcttcagattttaaaagatacaactattgatttagaaaaaatggacataaaaaatcgtaaagagtatctgtcgaatgatgaaaattggactgatgttgctcagatggatgatgcaaaagcgatatttaatagtaaattatccaatgttttatctcggtattggcggttttgtgtagatggtggagctagctcttattaccctcaatataccgaacttcaaatcctcggacaacgtttatcaaatgatgtcgctaatacgctgaaggatgcgatcgcttaa

SEQ ID NO: 100 - protein, 1183 aa, Artificial Sequence
  SYNTHETIC FUSION PROTEN
MGSSHHHHHHELPGPRENLYFQGAIAHMNDNVAWFKQAKYGMMIHWGLYSLLAGEYRGESSSAYAEWIQSKFQIPNAEYGNLATAFNPLYFDAKKIVALAKQCGMQYLVVTTKHHDGFAMYHSKVDAYNVYDATPFHRDIIGELAEACQKAGLKFGLYYSQDLDWHDPNGGGYKSNDVETAGTTWDNSWDFPDEDQKNFDLCFDNKILPQIKEIMSNYGDIATAWFDVPMTLSEAQSQTIYDTVRELQPNCLINSRLGNGKYDFVSLGDNEIPKNKEDMNKTDVDYNEITGFKPSPLGLYETAGTINDSWGFSYHDQNWKTPRTLYRYKQHLNDFGINYLLNVGLDPLGRVPMMAEENLLAAKALEDEANREFEEKTVQTGKTDQQVGAKLVQEIREGKRGPLYAGYFRTWHDRASTGIDGKQQHPENTMAEVPKEVDILFVFHDHTASDSPFWSELKDSYVHKLHQQGTALVQTIGVNELNGRTGLSKDYPDTPEGNKALAAAIVKAFVTDRGVDGLDIMIEHEFTNKRTPEEDARALNVFKEIAQLIGKNGSDKSKLLIMDTTLSVENNPIFKGIAEDLDYLLRQYYGSQGGEAEVDTINSDWNQYQNYIDASQFMIGFSFFEESASKGNLWFDVNEYDPNNPEKGKDIEGTRAKKYAEWQPSTGGLKAGIFSYAIDRDGVAHVPSTYKNRTSTNLQRHEVDNISHTDYTVSRKLKTLMTEDKRYDVIDQKDIPDPALREQIIQQVGQYKGDLERYNKTLVLTGDKIQNLKGLEKLSKLQKLELRQLSNVKEITPELLPESMKKDAELVMVGMTGLEKLNLSGLNRQTLDGIDVNSITHLTSFDISHNSLDLSEKSEDRKLLMTLMEQVSNHQKITVKNTAFENQKPKGYYPQTYDTKEGHYDVDNAEHDILTDFVFGTVTKRNTFIGDEEAFAIYKEGAVDGRQYVSKDYTYEAFRKDYKGYKVHLTASNLGETVTSKVTATTDETYLVDVSDGEKVVHHMKLNIGSGAIMMENLAKGAKVIGTSGDFEQAKKIFDGEKSDRFFTWGQTNWIAFDLGEINLAKEWRLFNAETNTEIKTDSSLNVAKGRLQILKDTTIDLEKMDIKNRKEYLSNDENWTDVAQMDDAKAIFNSKLSNVLSRYWRFCVDGGASSYYPQYTELQILGQRLSNDVANTLKDAIA

SEQ ID NO: 101 - DNA, 3552 bp, Artificial Sequence
  SYNTHETIC FUSION PROTEN
atgggcagcagccatcatcaccatcaccatgagctccccgggccgcgggaaaacctgtattttcagggagcgatcgctcatatgaacgacaacgtggcgtggttcaagcaggcgaaatatggcatgatgattcactggggtctgtacagcctgctggcgggcgagtatcgtggtgaaagcagcagcgcgtacgcggagtggatccagagcaagtttcaaattccgaacgcggaatacggcaacctggcgaccgcgttcaacccgctgtattttgatgcgaagaaaatcgttgcgctggcgaaacagtgcggcatgcaatacctggtggttaccaccaagcaccacgacggtttcgcgatgtatcacagcaaagtggacgcgtacaacgtttatgatgcgaccccgtttcaccgtgatatcattggcgagctggcggaagcgtgccagaaggcgggtctgaaattcggtctgtactatagccaagacctggattggcacgacccgaacggtggcggttataagagcaacgatgtggagaccgcgggtaccacctgggacaacagctgggatttcccggacgaagatcagaaaaacttcgacctgtgctttgataacaagatcctgccgcaaatcaaagagattatgagcaactacggtgacattgcgaccgcgtggtttgatgtgccgatgaccctgagcgaggcgcagagccaaaccatctatgacaccgttcgtgaactgcaaccgaactgcctgattaacagccgtctgggcaacggcaagtacgacttcgtgagcctgggcgataacgagatcccgaagaacaaagaagatatgaacaagaccgacgttgattacaacgagattaccggcttcaaaccgagcccgctgggcctgtatgaaaccgcgggtaccatcaacgacagctggggttttagctaccacgatcagaactggaagaccccgcgtaccctgtaccgttataaacaacacctgaacgactttggtattaactacctgctgaacgtgggcctggatccgctgggtcgtgttccgatgatggcggaggaaaacctgctggcggcgaaagcgctggaggacgaagcgaaccgtgaattcgaggagaagactgttcaaacaggaaagacagatcagcaggttggtgctaaattggtacaggaaatccgtgaaggaaaacgcggaccactatatgctggttattttaggacatggcatgatcgtgcttcaacaggaatagatggtaaacagcaacatccagaaaatactatggctgaggtcccaaaagaagttgatatcttatttgtttttcatgaccatacagcttcagatagtccattttggtctgaattaaaggacagttatgtccataaattacatcaacagggaacggcacttgttcagacaattggtgttaacgaattaaatggacgtacaggtttatctaaagattatcctgatactcctgaggggaacaaagctttagcagcagccattgtcaaggcatttgtaactgatcgtggtgtcgatggactagatattcagattgagcacgaatttacgaacaaaagaacacctgaagaagatgctcgtgctctaaatgtttttaaagagattgcgcagttaataggtaaaaatggtagtgataaatctaaattgctcatcatggacactaccctaagtgttgaaaataatccaatatttaaagggatagcggaagatcttgattatcttcttagacaatattatggttcacaaggtggagaagctgaagtggatactataaactctgattggaaccaatatcagaattatattgatgctagccagttcatgattggattctccttttttgaagaatctgcgtccaaagggaatttatggtttgatgttaacgaatacgaccctaacaatcctgaaaaagggaaagatattgaaggaacacgtgctaaaaaatatgcagagtggcaacctagtacaggtggtttaaaagcaggtatattctcttatgctattgatcgtgatggagtggctcatgttccttcaacatataaaaataggactagtacaaatttacaacggcatgaagtcgataatatctcacatactgactacaccgtatctcgaaaattaaaaacattgatgaccgaagacaaacgctatgatgtcattgatcaaaaagacattcctgacccagcattaagagaacaaatcattcaacaagttggacagtataaaggcgatttggaacgttataacaagacattggtgcttacaggagataagattcaaaatcttaaaggactagaaaaattaagcaagttacaaaaattagagttgcgccagctatctaacgttaaagaaattactccagaacttttgccggaaagcatgaaaaaagatgctgagcttgttatggtaggcatgactggtttagaaaaactaaaccttagtggtctaaatcgtcaaactttagacggtatagacgtgaatagtattacgcatttgacatcatttgatatttcacataatagtttggacttgtcggaaaagagtgaagaccgtaaactattaatgactttgatggagcaggtttcaaatcatcaaaaaataacggtgaaaaatacggcttttgaaaatcaaaaaccgaaaggttattatcctcagacgtatgataccaaagaaggtcattatgatgttgataatgcagaacatgatattttaactgattttgtttttggaactgttactaaacgtaatacctttattggagacgaagaagcatttgctatctataaagaaggagctgtcgatggtcgacaatatgtgtctaaagactatacttatgaagcttttcgtaaagactataaaggttacaaggttcatttaactgcttctaacctaggagaaacagttacttctaaggtaactgctactactgatgaaacttacttagtagatgtttctgatggggaaaaagttgttcaccacatgaaactcaatataggatctggtgccatcatgatggaaaatctggcaaaaggggctaaagtgattggtacatctggggactttgagcaagcaaagaagattttcgatggtgaaaagtcagatagattcttcacttggggacaaactaactggatagcttttgatctaggagaaattaatcttgcgaaggaatggcgtttatttaatgcagagacaaatactgaaataaagacagatagtagcttaaacgtggctaaaggacgtcttcagattttaaaagatacaactattgatttagaaaaaatggacataaaaaatcgtaaagagtatctgtcgaatgatgaaaattggactgatgttgctcagatggatgatgcaaaagcgatatttaatagtaaattatccaatgttttatctcggtattggcggttttgtgtagatggtggagctagctcttattaccctcaatataccgaacttcaaatcctcggacaacgtttatcaaatgatgtcgctaatacgctgaaggatgcgatcgcttaa

SEQ ID NO: 102 - protein, 1183 aa, Artificial Sequence
  SYNTHETIC FUSION PROTEN
MGSSHHHHHHELPGPRENLYFQGAIAHMNDNVAWFKQAKYGMMIHWGLYSLLAGEYRGESSSAYAEWIQSKFQIPNAEYGNLATAFNPLYFDAKKIVALAKQCGMQYLVVTTKHHDGFAMYHSKVDAYNVYDATPFHRDIIGELAEACQKAGLKFGLYYSQDLDWHDPNGGGYKSNDVETAGTTWDNSWDFPDEDQKNFDLCFDNKILPQIKEIMSNYGDIATAWFDVPMTLSEAQSQTIYDTVRELQPNCLINSRLGNGKYDFVSLGDNEIPKNKEDMNKTDVDYNEITGFKPSPLGLYETAGTINDSWGFSYHDQNWKTPRTLYRYKQHLNDFGINYLLNVGLDPLGRVPMMAEENLLAAKALEDEANREFEEKTVQTGKTDQQVGAKLVQEIREGKRGPLYAGYFRTWHDRASTGIDGKQQHPENTMAEVPKEVDILFVFHDHTASDSPFWSELKDSYVHKLHQQGTALVQTIGVNELNGRTGLSKDYPDTPEGNKALAAAIVKAFVTDRGVDGLDIQIEHEFTNKRTPEEDARALNVFKEIAQLIGKNGSDKSKLLIMDTTLSVENNPIFKGIAEDLDYLLRQYYGSQGGEAEVDTINSDWNQYQNYIDASQFMIGFSFFEESASKGNLWFDVNEYDPNNPEKGKDIEGTRAKKYAEWQPSTGGLKAGIFSYAIDRDGVAHVPSTYKNRTSTNLQRHEVDNISHTDYTVSRKLKTLMTEDKRYDVIDQKDIPDPALREQIIQQVGQYKGDLERYNKTLVLTGDKIQNLKGLEKLSKLQKLELRQLSNVKEITPELLPESMKKDAELVMVGMTGLEKLNLSGLNRQTLDGIDVNSITHLTSFDISHNSLDLSEKSEDRKLLMTLMEQVSNHQKITVKNTAFENQKPKGYYPQTYDTKEGHYDVDNAEHDILTDFVFGTVTKRNTFIGDEEAFAIYKEGAVDGRQYVSKDYTYEAFRKDYKGYKVHLTASNLGETVTSKVTATTDETYLVDVSDGEKVVHHMKLNIGSGAIMMENLAKGAKVIGTSGDFEQAKKIFDGEKSDRFFTWGQTNWIAFDLGEINLAKEWRLFNAETNTEIKTDSSLNVAKGRLQILKDTTIDLEKMDIKNRKEYLSNDENWTDVAQMDDAKAIFNSKLSNVLSRYWRFCVDGGASSYYPQYTELQILGQRLSNDVANTLKDAIA

SEQ ID NO: 103 - DNA, 3552 bp, Artificial Sequence
  SYNTHETIC FUSION PROTEN
atgggcagcagccatcatcaccatcaccatgagctccccgggccgcgggaaaacctgtattttcagggagcgatcgctcatatgaacgacaacgtggcgtggttcaagcaggcgaaatatggcatgatgattcactggggtctgtacagcctgctggcgggcgagtatcgtggtgaaagcagcagcgcgtacgcggagtggatccagagcaagtttcaaattccgaacgcggaatacggcaacctggcgaccgcgttcaacccgctgtattttgatgcgaagaaaatcgttgcgctggcgaaacagtgcggcatgcaatacctggtggttaccaccaagcaccacgacggtttcgcgatgtatcacagcaaagtggacgcgtacaacgtttatgatgcgaccccgtttcaccgtgatatcattggcgagctggcggaagcgtgccagaaggcgggtctgaaattcggtctgtactatagccaagacctggattggcacgacccgaacggtggcggttataagagcaacgatgtggagaccgcgggtaccacctgggacaacagctgggatttcccggacgaagatcagaaaaacttcgacctgtgctttgataacaagatcctgccgcaaatcaaagagattatgagcaactacggtgacattgcgaccgcgtggtttgatgtgccgatgaccctgagcgaggcgcagagccaaaccatctatgacaccgttcgtgaactgcaaccgaactgcctgattaacagccgtctgggcaacggcaagtacgacttcgtgagcctgggcgataacgagatcccgaagaacaaagaagatatgaacaagaccgacgttgattacaacgagattaccggcttcaaaccgagcccgctgggcctgtatgaaaccgcgggtaccatcaacgacagctggggttttagctaccacgatcagaactggaagaccccgcgtaccctgtaccgttataaacaacacctgaacgactttggtattaactacctgctgaacgtgggcctggatccgctgggtcgtgttccgatgatggcggaggaaaacctgctggcggcgaaagcgctggaggacgaagcgaaccgtgaattcgaggagaagactgttcaaacaggaaagacagatcagcaggttggtgctaaattggtacaggaaatccgtgaaggaaaacgcggaccactatatgctggttattttaggacatggcatgatcgtgcttcaacaggaatagatggtaaacagcaacatccagaaaatactatggctgaggtcccaaaagaagttgatatcttatttgtttttcatgaccatacagcttcagatagtccattttggtctgaattaaaggacagttatgtccataaattacatcaacagggaacggcacttgttcagacaattggtgttaacgaattaaatggacgtacaggtttatctaaagattatcctgatactcctgaggggaacaaagctttagcagcagccattgtcaaggcatttgtaactgatcgtggtgtcgatggactagatattaccattgagcacgaatttacgaacaaaagaacacctgaagaagatgctcgtgctctaaatgtttttaaagagattgcgcagttaataggtaaaaatggtagtgataaatctaaattgctcatcatggacactaccctaagtgttgaaaataatccaatatttaaagggatagcggaagatcttgattatcttcttagacaatattatggttcacaaggtggagaagctgaagtggatactataaactctgattggaaccaatatcagaattatattgatgctagccagttcatgattggattctccttttttgaagaatctgcgtccaaagggaatttatggtttgatgttaacgaatacgaccctaacaatcctgaaaaagggaaagatattgaaggaacacgtgctaaaaaatatgcagagtggcaacctagtacaggtggtttaaaagcaggtatattctcttatgctattgatcgtgatggagtggctcatgttccttcaacatataaaaataggactagtacaaatttacaacggcatgaagtcgataatatctcacatactgactacaccgtatctcgaaaattaaaaacattgatgaccgaagacaaacgctatgatgtcattgatcaaaaagacattcctgacccagcattaagagaacaaatcattcaacaagttggacagtataaaggcgatttggaacgttataacaagacattggtgcttacaggagataagattcaaaatcttaaaggactagaaaaattaagcaagttacaaaaattagagttgcgccagctatctaacgttaaagaaattactccagaacttttgccggaaagcatgaaaaaagatgctgagcttgttatggtaggcatgactggtttagaaaaactaaaccttagtggtctaaatcgtcaaactttagacggtatagacgtgaatagtattacgcatttgacatcatttgatatttcacataatagtttggacttgtcggaaaagagtgaagaccgtaaactattaatgactttgatggagcaggtttcaaatcatcaaaaaataacggtgaaaaatacggcttttgaaaatcaaaaaccgaaaggttattatcctcagacgtatgataccaaagaaggtcattatgatgttgataatgcagaacatgatattttaactgattttgtttttggaactgttactaaacgtaatacctttattggagacgaagaagcatttgctatctataaagaaggagctgtcgatggtcgacaatatgtgtctaaagactatacttatgaagcttttcgtaaagactataaaggttacaaggttcatttaactgcttctaacctaggagaaacagttacttctaaggtaactgctactactgatgaaacttacttagtagatgtttctgatggggaaaaagttgttcaccacatgaaactcaatataggatctggtgccatcatgatggaaaatctggcaaaaggggctaaagtgattggtacatctggggactttgagcaagcaaagaagattttcgatggtgaaaagtcagatagattcttcacttggggacaaactaactggatagcttttgatctaggagaaattaatcttgcgaaggaatggcgtttatttaatgcagagacaaatactgaaataaagacagatagtagcttaaacgtggctaaaggacgtcttcagattttaaaagatacaactattgatttagaaaaaatggacataaaaaatcgtaaagagtatctgtcgaatgatgaaaattggactgatgttgctcagatggatgatgcaaaagcgatatttaatagtaaattatccaatgttttatctcggtattggcggttttgtgtagatggtggagctagctcttattaccctcaatataccgaacttcaaatcctcggacaacgtttatcaaatgatgtcgctaatacgctgaaggatgcgatcgcttaa

SEQ ID NO: 104 - protein, 1183 aa, Artificial Sequence
  SYNTHETIC FUSION PROTEN
MGSSHHHHHHELPGPRENLYFQGAIAHMNDNVAWFKQAKYGMMIHWGLYSLLAGEYRGESSSAYAEWIQSKFQIPNAEYGNLATAFNPLYFDAKKIVALAKQCGMQYLVVTTKHHDGFAMYHSKVDAYNVYDATPFHRDIIGELAEACQKAGLKFGLYYSQDLDWHDPNGGGYKSNDVETAGTTWDNSWDFPDEDQKNFDLCFDNKILPQIKEIMSNYGDIATAWFDVPMTLSEAQSQTIYDTVRELQPNCLINSRLGNGKYDFVSLGDNEIPKNKEDMNKTDVDYNEITGFKPSPLGLYETAGTINDSWGFSYHDQNWKTPRTLYRYKQHLNDFGINYLLNVGLDPLGRVPMMAEENLLAAKALEDEANREFEEKTVQTGKTDQQVGAKLVQEIREGKRGPLYAGYFRTWHDRASTGIDGKQQHPENTMAEVPKEVDILFVFHDHTASDSPFWSELKDSYVHKLHQQGTALVQTIGVNELNGRTGLSKDYPDTPEGNKALAAAIVKAFVTDRGVDGLDITIEHEFTNKRTPEEDARALNVFKEIAQLIGKNGSDKSKLLIMDTTLSVENNPIFKGIAEDLDYLLRQYYGSQGGEAEVDTINSDWNQYQNYIDASQFMIGFSFFEESASKGNLWFDVNEYDPNNPEKGKDIEGTRAKKYAEWQPSTGGLKAGIFSYAIDRDGVAHVPSTYKNRTSTNLQRHEVDNISHTDYTVSRKLKTLMTEDKRYDVIDQKDIPDPALREQIIQQVGQYKGDLERYNKTLVLTGDKIQNLKGLEKLSKLQKLELRQLSNVKEITPELLPESMKKDAELVMVGMTGLEKLNLSGLNRQTLDGIDVNSITHLTSFDISHNSLDLSEKSEDRKLLMTLMEQVSNHQKITVKNTAFENQKPKGYYPQTYDTKEGHYDVDNAEHDILTDFVFGTVTKRNTFIGDEEAFAIYKEGAVDGRQYVSKDYTYEAFRKDYKGYKVHLTASNLGETVTSKVTATTDETYLVDVSDGEKVVHHMKLNIGSGAIMMENLAKGAKVIGTSGDFEQAKKIFDGEKSDRFFTWGQTNWIAFDLGEINLAKEWRLFNAETNTEIKTDSSLNVAKGRLQILKDTTIDLEKMDIKNRKEYLSNDENWTDVAQMDDAKAIFNSKLSNVLSRYWRFCVDGGASSYYPQYTELQILGQRLSNDVANTLKDAIA

SEQ ID NO: 105 - DNA, 3552 bp, Artificial Sequence
  SYNTHETIC FUSION PROTEN
atgggcagcagccatcatcaccatcaccatgagctccccgggccgcgggaaaacctgtattttcagggagcgatcgctcatatgaacgacaacgtggcgtggttcaagcaggcgaaatatggcatgatgattcactggggtctgtacagcctgctggcgggcgagtatcgtggtgaaagcagcagcgcgtacgcggagtggatccagagcaagtttcaaattccgaacgcggaatacggcaacctggcgaccgcgttcaacccgctgtattttgatgcgaagaaaatcgttgcgctggcgaaacagtgcggcatgcaatacctggtggttaccaccaagcaccacgacggtttcgcgatgtatcacagcaaagtggacgcgtacaacgtttatgatgcgaccccgtttcaccgtgatatcattggcgagctggcggaagcgtgccagaaggcgggtctgaaattcggtctgtactatagccaagacctggattggcacgacccgaacggtggcggttataagagcaacgatgtggagaccgcgggtaccacctgggacaacagctgggatttcccggacgaagatcagaaaaacttcgacctgtgctttgataacaagatcctgccgcaaatcaaagagattatgagcaactacggtgacattgcgaccgcgtggtttgatgtgccgatgaccctgagcgaggcgcagagccaaaccatctatgacaccgttcgtgaactgcaaccgaactgcctgattaacagccgtctgggcaacggcaagtacgacttcgtgagcctgggcgataacgagatcccgaagaacaaagaagatatgaacaagaccgacgttgattacaacgagattaccggcttcaaaccgagcccgctgggcctgtatgaaaccgcgggtaccatcaacgacagctggggttttagctaccacgatcagaactggaagaccccgcgtaccctgtaccgttataaacaacacctgaacgactttggtattaactacctgctgaacgtgggcctggatccgctgggtcgtgttccgatgatggcggaggaaaacctgctggcggcgaaagcgctggaggacgaagcgaaccgtgaattcgaggagaagactgttcaaacaggaaagacagatcagcaggttggtgctaaattggtacaggaaatccgtgaaggaaaacgcggaccactatatgctggttattttaggacatggcatgatcgtgcttcaacaggaatagatggtaaacagcaacatccagaaaatactatggctgaggtcccaaaagaagttgatatcttatttgtttttcatgaccatacagcttcagatagtccattttggtctgaattaaaggacagttatgtccataaattacatcaacagggaacggcacttgttcagacaattggtgttaacgaattaaatggacgtacaggtttatctaaagattatcctgatactcctgaggggaacaaagctttagcagcagccattgtcaaggcatttgtaactgatcgtggtgtcgatggactagatattttgattgagcacgaatttacgaacaaaagaacacctgaagaagatgctcgtgctctaaatgtttttaaagagattgcgcagttaataggtaaaaatggtagtgataaatctaaattgctcatcatggacactaccctaagtgttgaaaataatccaatatttaaagggatagcggaagatcttgattatcttcttagacaatattatggttcacaaggtggagaagctgaagtggatactataaactctgattggaaccaatatcagaattatattgatgctagccagttcatgattggattctccttttttgaagaatctgcgtccaaagggaatttatggtttgatgttaacgaatacgaccctaacaatcctgaaaaagggaaagatattgaaggaacacgtgctaaaaaatatgcagagtggcaacctagtacaggtggtttaaaagcaggtatattctcttatgctattgatcgtgatggagtggctcatgttccttcaacatataaaaataggactagtacaaatttacaacggcatgaagtcgataatatctcacatactgactacaccgtatctcgaaaattaaaaacattgatgaccgaagacaaacgctatgatgtcattgatcaaaaagacattcctgacccagcattaagagaacaaatcattcaacaagttggacagtataaaggcgatttggaacgttataacaagacattggtgcttacaggagataagattcaaaatcttaaaggactagaaaaattaagcaagttacaaaaattagagttgcgccagctatctaacgttaaagaaattactccagaacttttgccggaaagcatgaaaaaagatgctgagcttgttatggtaggcatgactggtttagaaaaactaaaccttagtggtctaaatcgtcaaactttagacggtatagacgtgaatagtattacgcatttgacatcatttgatatttcacataatagtttggacttgtcggaaaagagtgaagaccgtaaactattaatgactttgatggagcaggtttcaaatcatcaaaaaataacggtgaaaaatacggcttttgaaaatcaaaaaccgaaaggttattatcctcagacgtatgataccaaagaaggtcattatgatgttgataatgcagaacatgatattttaactgattttgtttttggaactgttactaaacgtaatacctttattggagacgaagaagcatttgctatctataaagaaggagctgtcgatggtcgacaatatgtgtctaaagactatacttatgaagcttttcgtaaagactataaaggttacaaggttcatttaactgcttctaacctaggagaaacagttacttctaaggtaactgctactactgatgaaacttacttagtagatgtttctgatggggaaaaagttgttcaccacatgaaactcaatataggatctggtgccatcatgatggaaaatctggcaaaaggggctaaagtgattggtacatctggggactttgagcaagcaaagaagattttcgatggtgaaaagtcagatagattcttcacttggggacaaactaactggatagcttttgatctaggagaaattaatcttgcgaaggaatggcgtttatttaatgcagagacaaatactgaaataaagacagatagtagcttaaacgtggctaaaggacgtcttcagattttaaaagatacaactattgatttagaaaaaatggacataaaaaatcgtaaagagtatctgtcgaatgatgaaaattggactgatgttgctcagatggatgatgcaaaagcgatatttaatagtaaattatccaatgttttatctcggtattggcggttttgtgtagatggtggagctagctcttattaccctcaatataccgaacttcaaatcctcggacaacgtttatcaaatgatgtcgctaatacgctgaaggatgcgatcgcttaa

SEQ ID NO: 106 - protein, 1183 aa, Artificial Sequence
  SYNTHETIC FUSION PROTEN
MGSSHHHHHHELPGPRENLYFQGAIAHMNDNVAWFKQAKYGMMIHWGLYSLLAGEYRGESSSAYAEWIQSKFQIPNAEYGNLATAFNPLYFDAKKIVALAKQCGMQYLVVTTKHHDGFAMYHSKVDAYNVYDATPFHRDIIGELAEACQKAGLKFGLYYSQDLDWHDPNGGGYKSNDVETAGTTWDNSWDFPDEDQKNFDLCFDNKILPQIKEIMSNYGDIATAWFDVPMTLSEAQSQTIYDTVRELQPNCLINSRLGNGKYDFVSLGDNEIPKNKEDMNKTDVDYNEITGFKPSPLGLYETAGTINDSWGFSYHDQNWKTPRTLYRYKQHLNDFGINYLLNVGLDPLGRVPMMAEENLLAAKALEDEANREFEEKTVQTGKTDQQVGAKLVQEIREGKRGPLYAGYFRTWHDRASTGIDGKQQHPENTMAEVPKEVDILFVFHDHTASDSPFWSELKDSYVHKLHQQGTALVQTIGVNELNGRTGLSKDYPDTPEGNKALAAAIVKAFVTDRGVDGLDILIEHEFTNKRTPEEDARALNVFKEIAQLIGKNGSDKSKLLIMDTTLSVENNPIFKGIAEDLDYLLRQYYGSQGGEAEVDTINSDWNQYQNYIDASQFMIGFSFFEESASKGNLWFDVNEYDPNNPEKGKDIEGTRAKKYAEWQPSTGGLKAGIFSYAIDRDGVAHVPSTYKNRTSTNLQRHEVDNISHTDYTVSRKLKTLMTEDKRYDVIDQKDIPDPALREQIIQQVGQYKGDLERYNKTLVLTGDKIQNLKGLEKLSKLQKLELRQLSNVKEITPELLPESMKKDAELVMVGMTGLEKLNLSGLNRQTLDGIDVNSITHLTSFDISHNSLDLSEKSEDRKLLMTLMEQVSNHQKITVKNTAFENQKPKGYYPQTYDTKEGHYDVDNAEHDILTDFVFGTVTKRNTFIGDEEAFAIYKEGAVDGRQYVSKDYTYEAFRKDYKGYKVHLTASNLGETVTSKVTATTDETYLVDVSDGEKVVHHMKLNIGSGAIMMENLAKGAKVIGTSGDFEQAKKIFDGEKSDRFFTWGQTNWIAFDLGEINLAKEWRLFNAETNTEIKTDSSLNVAKGRLQILKDTTIDLEKMDIKNRKEYLSNDENWTDVAQMDDAKAIFNSKLSNVLSRYWRFCVDGGASSYYPQYTELQILGQRLSNDVANTLKDAIA

SEQ ID NO: 107 - DNA, 3552 bp, Artificial Sequence
  SYNTHETIC FUSION PROTEN
atgggcagcagccatcatcaccatcaccatgagctccccgggccgcgggaaaacctgtattttcagggagcgatcgctcatatgaacgacaacgtggcgtggttcaagcaggcgaaatatggcatgatgattcactggggtctgtacagcctgctggcgggcgagtatcgtggtgaaagcagcagcgcgtacgcggagtggatccagagcaagtttcaaattccgaacgcggaatacggcaacctggcgaccgcgttcaacccgctgtattttgatgcgaagaaaatcgttgcgctggcgaaacagtgcggcatgcaatacctggtggttaccaccaagcaccacgacggtttcgcgatgtatcacagcaaagtggacgcgtacaacgtttatgatgcgaccccgtttcaccgtgatatcattggcgagctggcggaagcgtgccagaaggcgggtctgaaattcggtctgtactatagccaagacctggattggcacgacccgaacggtggcggttataagagcaacgatgtggagaccgcgggtaccacctgggacaacagctgggatttcccggacgaagatcagaaaaacttcgacctgtgctttgataacaagatcctgccgcaaatcaaagagattatgagcaactacggtgacattgcgaccgcgtggtttgatgtgccgatgaccctgagcgaggcgcagagccaaaccatctatgacaccgttcgtgaactgcaaccgaactgcctgattaacagccgtctgggcaacggcaagtacgacttcgtgagcctgggcgataacgagatcccgaagaacaaagaagatatgaacaagaccgacgttgattacaacgagattaccggcttcaaaccgagcccgctgggcctgtatgaaaccgcgggtaccatcaacgacagctggggttttagctaccacgatcagaactggaagaccccgcgtaccctgtaccgttataaacaacacctgaacgactttggtattaactacctgctgaacgtgggcctggatccgctgggtcgtgttccgatgatggcggaggaaaacctgctggcggcgaaagcgctggaggacgaagcgaaccgtgaattcgaggagaagactgttcaaacaggaaagacagatcagcaggttggtgctaaattggtacaggaaatccgtgaaggaaaacgcggaccactatatgctggttattttaggacatggcatgatcgtgcttcaacaggaatagatggtaaacagcaacatccagaaaatactatggctgaggtcccaaaagaagttgatatcttatttgtttttcatgaccatacagcttcagatagtccattttggtctgaattaaaggacagttatgtccataaattacatcaacagggaacggcacttgttcagacaattggtgttaacgaattaaatggacgtacaggtttatctaaagattatcctgatactcctgaggggaacaaagctttagcagcagccattgtcaaggcatttgtaactgatcgtggtgtcgatggactagatatttttattgagcacgaatttacgaacaaaagaacacctgaagaagatgctcgtgctctaaatgtttttaaagagattgcgcagttaataggtaaaaatggtagtgataaatctaaattgctcatcatggacactaccctaagtgttgaaaataatccaatatttaaagggatagcggaagatcttgattatcttcttagacaatattatggttcacaaggtggagaagctgaagtggatactataaactctgattggaaccaatatcagaattatattgatgctagccagttcatgattggattctccttttttgaagaatctgcgtccaaagggaatttatggtttgatgttaacgaatacgaccctaacaatcctgaaaaagggaaagatattgaaggaacacgtgctaaaaaatatgcagagtggcaacctagtacaggtggtttaaaagcaggtatattctcttatgctattgatcgtgatggagtggctcatgttccttcaacatataaaaataggactagtacaaatttacaacggcatgaagtcgataatatctcacatactgactacaccgtatctcgaaaattaaaaacattgatgaccgaagacaaacgctatgatgtcattgatcaaaaagacattcctgacccagcattaagagaacaaatcattcaacaagttggacagtataaaggcgatttggaacgttataacaagacattggtgcttacaggagataagattcaaaatcttaaaggactagaaaaattaagcaagttacaaaaattagagttgcgccagctatctaacgttaaagaaattactccagaacttttgccggaaagcatgaaaaaagatgctgagcttgttatggtaggcatgactggtttagaaaaactaaaccttagtggtctaaatcgtcaaactttagacggtatagacgtgaatagtattacgcatttgacatcatttgatatttcacataatagtttggacttgtcggaaaagagtgaagaccgtaaactattaatgactttgatggagcaggtttcaaatcatcaaaaaataacggtgaaaaatacggcttttgaaaatcaaaaaccgaaaggttattatcctcagacgtatgataccaaagaaggtcattatgatgttgataatgcagaacatgatattttaactgattttgtttttggaactgttactaaacgtaatacctttattggagacgaagaagcatttgctatctataaagaaggagctgtcgatggtcgacaatatgtgtctaaagactatacttatgaagcttttcgtaaagactataaaggttacaaggttcatttaactgcttctaacctaggagaaacagttacttctaaggtaactgctactactgatgaaacttacttagtagatgtttctgatggggaaaaagttgttcaccacatgaaactcaatataggatctggtgccatcatgatggaaaatctggcaaaaggggctaaagtgattggtacatctggggactttgagcaagcaaagaagattttcgatggtgaaaagtcagatagattcttcacttggggacaaactaactggatagcttttgatctaggagaaattaatcttgcgaaggaatggcgtttatttaatgcagagacaaatactgaaataaagacagatagtagcttaaacgtggctaaaggacgtcttcagattttaaaagatacaactattgatttagaaaaaatggacataaaaaatcgtaaagagtatctgtcgaatgatgaaaattggactgatgttgctcagatggatgatgcaaaagcgatatttaatagtaaattatccaatgttttatctcggtattggcggttttgtgtagatggtggagctagctcttattaccctcaatataccgaacttcaaatcctcggacaacgtttatcaaatgatgtcgctaatacgctgaaggatgcgatcgcttaa

SEQ ID NO: 108 - protein, 1183 aa, Artificial Sequence
  SYNTHETIC FUSION PROTEN
MGSSHHHHHHELPGPRENLYFQGAIAHMNDNVAWFKQAKYGMMIHWGLYSLLAGEYRGESSSAYAEWIQSKFQIPNAEYGNLATAFNPLYFDAKKIVALAKQCGMQYLVVTTKHHDGFAMYHSKVDAYNVYDATPFHRDIIGELAEACQKAGLKFGLYYSQDLDWHDPNGGGYKSNDVETAGTTWDNSWDFPDEDQKNFDLCFDNKILPQIKEIMSNYGDIATAWFDVPMTLSEAQSQTIYDTVRELQPNCLINSRLGNGKYDFVSLGDNEIPKNKEDMNKTDVDYNEITGFKPSPLGLYETAGTINDSWGFSYHDQNWKTPRTLYRYKQHLNDFGINYLLNVGLDPLGRVPMMAEENLLAAKALEDEANREFEEKTVQTGKTDQQVGAKLVQEIREGKRGPLYAGYFRTWHDRASTGIDGKQQHPENTMAEVPKEVDILFVFHDHTASDSPFWSELKDSYVHKLHQQGTALVQTIGVNELNGRTGLSKDYPDTPEGNKALAAAIVKAFVTDRGVDGLDIFIEHEFTNKRTPEEDARALNVFKEIAQLIGKNGSDKSKLLIMDTTLSVENNPIFKGIAEDLDYLLRQYYGSQGGEAEVDTINSDWNQYQNYIDASQFMIGFSFFEESASKGNLWFDVNEYDPNNPEKGKDIEGTRAKKYAEWQPSTGGLKAGIFSYAIDRDGVAHVPSTYKNRTSTNLQRHEVDNISHTDYTVSRKLKTLMTEDKRYDVIDQKDIPDPALREQIIQQVGQYKGDLERYNKTLVLTGDKIQNLKGLEKLSKLQKLELRQLSNVKEITPELLPESMKKDAELVMVGMTGLEKLNLSGLNRQTLDGIDVNSITHLTSFDISHNSLDLSEKSEDRKLLMTLMEQVSNHQKITVKNTAFENQKPKGYYPQTYDTKEGHYDVDNAEHDILTDFVFGTVTKRNTFIGDEEAFAIYKEGAVDGRQYVSKDYTYEAFRKDYKGYKVHLTASNLGETVTSKVTATTDETYLVDVSDGEKVVHHMKLNIGSGAIMMENLAKGAKVIGTSGDFEQAKKIFDGEKSDRFFTWGQTNWIAFDLGEINLAKEWRLFNAETNTEIKTDSSLNVAKGRLQILKDTTIDLEKMDIKNRKEYLSNDENWTDVAQMDDAKAIFNSKLSNVLSRYWRFCVDGGASSYYPQYTELQILGQRLSNDVANTLKDAIA

SEQ ID NO: 109 - DNA, 3108 bp, Artificial Sequence
  SYNTHETIC FUSION PROTEN
atgggcagcagccatcatcatcatcatcacagcagcggcctggtgccgcgcggcagccatatgggtaccctgcagggatccaaagataagtcgtatgatctgattgatgagaaagatttcccagataaggctttgcgagaagctgtgatggcgcaggttggaaccagaaaaggtgatttggaacgtttcaatggcacattacgattggataatccagcgattcaaagtttagaaggtctaaataaatttaaaaaattagctcaattagacttgattggcttatctcgcattacaaagctcgaccgttctgttttacccgctaatatgaagccaggcaaagataccttggaaacagttcttgaaacctataaaaaggataacaaagaagaacctgctactatcccaccagtatctttgaaggtttctggtttaactggtctgaaagaattagatttgtcaggttttgaccgtgaaaccttggctggtcttgatgccgctactctaacgtctttagaaaaagttgatatttctggcaacaaacttgatttggctccaggaacagaaaatcgacaaatttttgatactatgctatcaactatcagcaatcatgttggaagcaatgaacaaacagtgaaatttgacaagcaaaaaccaactgggcattacccagatacctatgggaaaactagtctgcgcttaccagtggcaaatgaaaaagttgatttgcaaagccagcttttgtttgggactgtgacaaatcaaggaaccctaatcaatagcgaagcagactataaggcttaccaaaatcataaaattgctggacgtagctttgttgattcaaactatcattacaataactttaaagtttcttatgagaactataccgttaaagtaactgattccacattgggaaccactactgacaaaacgctagcaactgataaagaagagacctataaggttgacttctttagcccagcagataagacaaaagctgttcatactgctaaagtgattgttggtgacgaaaaaaccatgatggttaatttggcagaaggcgcaacagttattggaggaagtgctgatcctgtaaatgcaagaaaggtatttgatgggcaactgggcagtgagactgataatatctctttaggatgggattctaagcaaagtattatatttaaattgaaagaagatggattaataaagcattggcgtttcttcaatgattcagcccgaaatcctgagacaaccaataaacctattcaggaagcaagtctacaaatttttaatatcaaagattataatctagataatttgttggaaaatcccaataaatttgatgatgaaaaatattggattactgtagatacttacagtgcacaaggagagagagctactgcattcagtaatacattaaataatattactagtaaatattggcgagttgtctttgatactaaaggagatagatatagttcgccagtagtccctgaactccaaattttaggttatccgttacctaacgccgacactatcatgaaaacagtaactactgctaaagagttatctcaacaaaaagataagttttctcaaaagatgcttgatgagttaaaaataaaagagatggctttagaaacttctttgaacagtaagatttttgatgtaactgctattaatgctaatgctggagttttgaaagattgtattgagaaaaggcagctgctaaaaaaaggcggtgcacaggaagcaaaaaaagaaattccgctgaaatatggcgccaccaatgaaggtaaacgtcaggaccctgccatgcagaaatttcgtgataatcgtctgggcgcatttattcattggggcctgtatgcaattccgggtggtgaatggaatggtaaagtgtatggtggtgcagcagaatggctgaaaagttgggcaaaagttccggccgatgaatggctgaagctgatggatcagtggaatccgaccaaatttgatgcaaaaaaatgggccaaaatggccaaagaaatgggcaccaaatatgtgaaaattaccaccaaacatcacgaaggcttttgcctgtggccgagtaaatataccaaatataccgtggccaataccccgtataaacgtgatattctgggcgaactggttaaagcctataatgatgaaggtattgatgttcatttctactttagcgtgatggattggagcaatccggattatcgttatgatattaaaagcaaagaggacagtatcgcctttagtcgctttctggaatttaccgataatcagctgaaagaactggccacccgttatccgaccgttaaagatttttggtttgatggtacctgggatgcaagcgtgaaaaaaaatggttggtggaccgcacatgcagaacagatgctgaaagaattagttccgggtgttgcaattaatagtcgcctgcgtgcagatgataaaggtaaacgtcattttgatagcaatggccgtctgatgggcgattatgaaagtggttatgaacgtcgtctgccggaccctgtgaaagatctgaaagtgacccagtgggattgggaagcatgcatgaccattccggaaaatcagtggggctatcataaagattggagtctgagttatgttaaaaccccgattgaagtgattgatcgtattgtgcatgccgttagcatgggtggtaatatggtggtgaattttggtccgcaggcagatggtgattttcgtccggaagaaaaagcaatggcaaccgcaattggtaaatggatgaatcgctatggtaaagcagtttatgcctgtgattatgccggttttgaaaaacaggattggggttattatacccgcggtaaaaatgatgaagtttatatggttgtgttcaaccagccgtatagcgaacgtctgattgttaaaacccctaaaggtattaccgtggaaaaagcaaccctgctgaccaccggcgaagatattaccgttgtggaaaccacccgtaatgaatataatgttagtgttccgaaaaagaacccgggcgaaccgtatgttattcagctgaaagttcgtgcagccaaaggcaccaaaagtatttatcgtgatgccctgacgtaa

SEQ ID NO: 110 - protein, 1035 aa, Artificial Sequence
  SYNTHETIC FUSION PROTEN
MGSSHHHHHHSSGLVPRGSHMGTLQGSKDKSYDLIDEKDFPDKALREAVMAQVGTRKGDLERFNGTLRLDNPAIQSLEGLNKFKKLAQLDLIGLSRITKLDRSVLPANMKPGKDTLETVLETYKKDNKEEPATIPPVSLKVSGLTGLKELDLSGFDRETLAGLDAATLTSLEKVDISGNKLDLAPGTENRQIFDTMLSTISNHVGSNEQTVKFDKQKPTGHYPDTYGKTSLRLPVANEKVDLQSQLLFGTVTNQGTLINSEADYKAYQNHKIAGRSFVDSNYHYNNFKVSYENYTVKVTDSTLGTTTDKTLATDKEETYKVDFFSPADKTKAVHTAKVIVGDEKTMMVNLAEGATVIGGSADPVNARKVFDGQLGSETDNISLGWDSKQSIIFKLKEDGLIKHWRFFNDSARNPETTNKPIQEASLQIFNIKDYNLDNLLENPNKFDDEKYWITVDTYSAQGERATAFSNTLNNITSKYWRVVFDTKGDRYSSPVVPELQILGYPLPNADTIMKTVTTAKELSQQKDKFSQKMLDELKIKEMALETSLNSKIFDVTAINANAGVLKDCIEKRQLLKKGGAQEAKKEIPLKYGATNEGKRQDPAMQKFRDNRLGAFIHWGLYAIPGGEWNGKVYGGAAEWLKSWAKVPADEWLKLMDQWNPTKFDAKKWAKMAKEMGTKYVKITTKHHEGFCLWPSKYTKYTVANTPYKRDILGELVKAYNDEGIDVHFYFSVMDWSNPDYRYDIKSKEDSIAFSRFLEFTDNQLKELATRYPTVKDFWFDGTWDASVKKNGWWTAHAEQMLKELVPGVAINSRLRADDKGKRHFDSNGRLMGDYESGYERRLPDPVKDLKVTQWDWEACMTIPENQWGYHKDWSLSYVKTPIEVIDRIVHAVSMGGNMVVNFGPQADGDFRPEEKAMATAIGKWMNRYGKAVYACDYAGFEKQDWGYYTRGKNDEVYMVVFNQPYSERLIVKTPKGITVEKATLLTTGEDITVVETTRNEYNVSVPKKNPGEPYVIQLKVRAAKGTKSIYRDALT

SEQ ID NO: 111 - DNA, 2835 bp, Artificial Sequence
  SYNTHETIC FUSION PROTEN
atgggcagcagccatcatcatcatcatcacagcagcggcctggtgccgcgcggcagccatatgggtaccctgcagggatccaccgaagacaaacgctatgatgtcattgatcaaaaagacattcctgacccagcattaagagaacaaatcattcaacaagttggacagtataaaggcgatttggaacgttataacaagacattggtgcttacaggagataagattcaaaatcttaaaggactagaaaaattaagcaagttacaaaaattagagttgcgccagctatctaacgttaaagaaattactccagaacttttgccggaaagcatgaaaaaagatgctgagcttgttatggtaggcatgactggtttagaaaaactaaaccttagtggtctaaatcgtcaaactttagacggtatagacgtgaatagtattacgcatttgacatcatttgatatttcacataatagtttggacttgtcggaaaagagtgaagaccgtaaactattaatgactttgatggagcaggtttcaaatcatcaaaaaataacggtgaaaaatacggcttttgaaaatcaaaaaccgaaaggttattatcctcagacgtatgataccaaagaaggtcattatgatgttgataatgcagaacatgatattttaactgattttgtttttggaactgttactaaacgtaatacctttattggagacgaagaagcatttgctatctataaagaaggagctgtcgatggtcgacaatatgtgtctaaagactatacttatgaagcttttcgtaaagactataaaggttacaaggttcatttaactgcttctaacctaggagaaacagttacttctaaggtaactgctactactgatgaaacttacttagtagatgtttctgatggggaaaaagttgttcaccacatgaaactcaatataggatctggtgccatcatgatggaaaatctggcaaaaggggctaaagtgattggtacatctggggactttgagcaagcaaagaagattttcgatggtgaaaagtcagatagattcttcacttggggacaaactaactggatagcttttgatctaggagaaattaatcttgcgaaggaatggcgtttatttaatgcagagacaaatactgaaataaagacagatagtagcttaaacgtggctaaaggacgtcttcagattttaaaagatacaactattgatttagaaaaaatggacataaaaaatcgtaaagagtatctgtcgaatgatgaaaattggactgatgttgctcagatggatgatgcaaaagcgatatttaatagtaaattatccaatgttttatctcggtattggcggttttgtgtagatggtggagctagctcttattaccctcaatataccgaacttcaaatcctcggacaacgtttatcaaatgatgtcgctaatacgctgaaggatggcggtgcacaggaagcaaaaaaagaaattccgctgaaatatggcgccaccaatgaaggtaaacgtcaggaccctgccatgcagaaatttcgtgataatcgtctgggcgcatttattcattggggcctgtatgcaattccgggtggtgaatggaatggtaaagtgtatggtggtgcagcagaatggctgaaaagttgggcaaaagttccggccgatgaatggctgaagctgatggatcagtggaatccgaccaaatttgatgcaaaaaaatgggccaaaatggccaaagaaatgggcaccaaatatgtgaaaattaccaccaaacatcacgaaggcttttgcctgtggccgagtaaatataccaaatataccgtggccaataccccgtataaacgtgatattctgggcgaactggttaaagcctataatgatgaaggtattgatgttcatttctactttagcgtgatggattggagcaatccggattatcgttatgatattaaaagcaaagaggacagtatcgcctttagtcgctttctggaatttaccgataatcagctgaaagaactggccacccgttatccgaccgttaaagatttttggtttgatggtacctgggatgcaagcgtgaaaaaaaatggttggtggaccgcacatgcagaacagatgctgaaagaattagttccgggtgttgcaattaatagtcgcctgcgtgcagatgataaaggtaaacgtcattttgatagcaatggccgtctgatgggcgattatgaaagtggttatgaacgtcgtctgccggaccctgtgaaagatctgaaagtgacccagtgggattgggaagcatgcatgaccattccggaaaatcagtggggctatcataaagattggagtctgagttatgttaaaaccccgattgaagtgattgatcgtattgtgcatgccgttagcatgggtggtaatatggtggtgaattttggtccgcaggcagatggtgattttcgtccggaagaaaaagcaatggcaaccgcaattggtaaatggatgaatcgctatggtaaagcagtttatgcctgtgattatgccggttttgaaaaacaggattggggttattatacccgcggtaaaaatgatgaagtttatatggttgtgttcaaccagccgtatagcgaacgtctgattgttaaaacccctaaaggtattaccgtggaaaaagcaaccctgctgaccaccggcgaagatattaccgttgtggaaaccacccgtaatgaatataatgttagtgttccgaaaaagaacccgggcgaaccgtatgttattcagctgaaagttcgtgcagccaaaggcaccaaaagtatttatcgtgatgccctgacgtaa

SEQ ID NO: 112 - protein, 944 aa, Artificial Sequence
  SYNTHETIC FUSION PROTEN
MGSSHHHHHHSSGLVPRGSHMGTLQGSTEDKRYDVIDQKDIPDPALREQIIQQVGQYKGDLERYNKTLVLTGDKIQNLKGLEKLSKLQKLELRQLSNVKEITPELLPESMKKDAELVMVGMTGLEKLNLSGLNRQTLDGIDVNSITHLTSFDISHNSLDLSEKSEDRKLLMTLMEQVSNHQKITVKNTAFENQKPKGYYPQTYDTKEGHYDVDNAEHDILTDFVFGTVTKRNTFIGDEEAFAIYKEGAVDGRQYVSKDYTYEAFRKDYKGYKVHLTASNLGETVTSKVTATTDETYLVDVSDGEKVVHHMKLNIGSGAIMMENLAKGAKVIGTSGDFEQAKKIFDGEKSDRFFTWGQTNWIAFDLGEINLAKEWRLFNAETNTEIKTDSSLNVAKGRLQILKDTTIDLEKMDIKNRKEYLSNDENWTDVAQMDDAKAIFNSKLSNVLSRYWRFCVDGGASSYYPQYTELQILGQRLSNDVANTLKDGGAQEAKKEIPLKYGATNEGKRQDPAMQKFRDNRLGAFIHWGLYAIPGGEWNGKVYGGAAEWLKSWAKVPADEWLKLMDQWNPTKFDAKKWAKMAKEMGTKYVKITTKHHEGFCLWPSKYTKYTVANTPYKRDILGELVKAYNDEGIDVHFYFSVMDWSNPDYRYDIKSKEDSIAFSRFLEFTDNQLKELATRYPTVKDFWFDGTWDASVKKNGWWTAHAEQMLKELVPGVAINSRLRADDKGKRHFDSNGRLMGDYESGYERRLPDPVKDLKVTQWDWEACMTIPENQWGYHKDWSLSYVKTPIEVIDRIVHAVSMGGNMVVNFGPQADGDFRPEEKAMATAIGKWMNRYGKAVYACDYAGFEKQDWGYYTRGKNDEVYMVVFNQPYSERLIVKTPKGITVEKATLLTTGEDITVVETTRNEYNVSVPKKNPGEPYVIQLKVRAAKGTKSIYRDALT

SEQ ID NO: 113 - DNA, 4383 bp, Artificial Sequence
  SYNTHETIC FUSION PROTEN
atgggcagcagccatcatcatcatcatcacagcagcggcctggtgccgcgcggcagccatatgacccaccatgattcactcaatactgtaaaagcggaggagaagactgttcaggttcagaaaggattaccttctatcgatagcttgcattatctgtcagagaatagcaaaaaagaatttaaagaagaactctcaaaagcggggcaagaatctcaaaaggtcaaagagatattagcaaaagctcagcaggcagataaacaagctcaagaacttgccaaaatgaaaattcctgagaaaataccgatgaaaccgttacatggttctctctacggtggttactttagaacttggcatgacaaaacatcagatccaacagaaaaagacaaagttaactcgatgggagagcttcctaaagaagtagatctagcctttattttccacgattggacaaaagattatagccttttttggaaagaattggccaccaaacatgtgccaaagttaaacaagcaagggacacgtgtcattcgtaccattccatggcgtttcctagctgggggtgataacagtggtattgcagaagataccagtaaatacccaaatacaccagagggaaataaagctttagccaaagctattgttgatgaatatgtttataaatacaaccttgatggcttagatgtggatgttgaacatgatagtattccaaaagttgacaaaaaagaagatacagcaggcgtagaacgctctattcaagtgtttgaagaaattgggaaattaattggaccaaaaggtgttgataaatcgcggttatttattatggatagcacctacatggctgataaaaacccattgattgagcgaggagctccttatattaatttattactggtacaggtctatggttcacaaggagagaaaggtggttgggagcctgtttctaatcgacctgaaaaaacaatggaagaacgatggcaaggttatagcaagtatattcgtcctgaacaatacatgattggtttttctttctatgaggaaaatgctcaagaagggaatctttggtatgatattaattctcgcaaggacgaggacaaagcaaatggaattaacactgacataactggaacgcgtgccgaacggtatgcaaggtggcaacctaagacaggtggggttaagggaggtatcttctcctacgctattgaccgagatggtgtagctcatcaacctaaaaaatatgctaaacagaaagagtttaaggacgcaactgataacatcttccactcagattatagtgtctccaaggcattaaagacagttatgctaaaagataagtcgtatgatctgattgatgagaaagatttcccagataaggctttgcgagaagctgtgatggcgcaggttggaaccagaaaaggtgatttggaacgtttcaatggcacattacgattggataatccagcgattcaaagtttagaaggtctaaataaatttaaaaaattagctcaattagacttgattggcttatctcgcattacaaagctcgaccgttctgttttacccgctaatatgaagccaggcaaagataccttggaaacagttcttgaaacctataaaaaggataacaaagaagaacctgctactatcccaccagtatctttgaaggtttctggtttaactggtctgaaagaattagatttgtcaggttttgaccgtgaaaccttggctggtcttgatgccgctactctaacgtctttagaaaaagttgatatttctggcaacaaacttgatttggctccaggaacagaaaatcgacaaatttttgatactatgctatcaactatcagcaatcatgttggaagcaatgaacaaacagtgaaatttgacaagcaaaaaccaactgggcattacccagatacctatgggaaaactagtctgcgcttaccagtggcaaatgaaaaagttgatttgcaaagccagcttttgtttgggactgtgacaaatcaaggaaccctaatcaatagcgaagcagactataaggcttaccaaaatcataaaattgctggacgtagctttgttgattcaaactatcattacaataactttaaagtttcttatgagaactataccgttaaagtaactgattccacattgggaaccactactgacaaaacgctagcaactgataaagaagagacctataaggttgacttctttagcccagcagataagacaaaagctgttcatactgctaaagtgattgttggtgacgaaaaaaccatgatggttaatttggcagaaggcgcaacagttattggaggaagtgctgatcctgtaaatgcaagaaaggtatttgatgggcaactgggcagtgagactgataatatctctttaggatgggattctaagcaaagtattatatttaaattgaaagaagatggattaataaagcattggcgtttcttcaatgattcagcccgaaatcctgagacaaccaataaacctattcaggaagcaagtctacaaatttttaatatcaaagattataatctagataatttgttggaaaatcccaataaatttgatgatgaaaaatattggattactgtagatacttacagtgcacaaggagagagagctactgcattcagtaatacattaaataatattactagtaaatattggcgagttgtctttgatactaaaggagatagatatagttcgccagtagtccctgaactccaaattttaggttatccgttacctaacgccgacactatcatgaaaacagtaactactgctaaagagttatctcaacaaaaagataagttttctcaaaagatgcttgatgagttaaaaataaaagagatggctttagaaacttctttgaacagtaagatttttgatgtaactgctattaatgctaatgctggagttttgaaagattgtattgagaaaaggcagctgctaaaaaaaggatccggtgctcaggaagcaaaaaaagaaattccgctgaaatatggcgccaccaatgaaggtaaacgtcaggaccctgccatgcagaaatttcgtgataatcgtctgggcgcatttattcattggggcctgtatgcaattccgggtggtgaatggaatggtaaagtgtatggtggtgcagcagaatggctgaaaagttgggcaaaagttccggccgatgaatggctgaagctgatggatcagtggaatccgaccaaatttgatgcaaaaaaatgggccaaaatggccaaagaaatgggcaccaaatatgtgaaaattaccaccaaacatcacgaaggcttttgcctgtggccgagtaaatataccaaatataccgtggccaataccccgtataaacgtgatattctgggcgaactggttaaagcctataatgatgaaggtattgatgttcatttctactttagcgtgatggattggagcaatccggattatcgttatgatattaaaagcaaagaggacagtatcgcctttagtcgctttctggaatttaccgataatcagctgaaagaactggccacccgttatccgaccgttaaagatttttggtttgatggtacctgggatgcaagcgtgaaaaaaaatggttggtggaccgcacatgcagaacagatgctgaaagaattagttccgggtgttgcaattaatagtcgcctgcgtgcagatgataaaggtaaacgtcattttgatagcaatggccgtctgatgggcgattatgaaagtggttatgaacgtcgtctgccggaccctgtgaaagatctgaaagtgacccagtgggattgggaagcatgcatgaccattccggaaaatcagtggggctatcataaagattggagtctgagttatgttaaaaccccgattgaagtgattgatcgtattgtgcatgccgttagcatgggtggtaatatggtggtgaattttggtccgcaggcagatggtgattttcgtccggaagaaaaagcaatggcaaccgcaattggtaaatggatgaatcgctatggtaaagcagtttatgcctgtgattatgccggttttgaaaaacaggattggggttattatacccgcggtaaaaatgatgaagtttatatggttgtgttcaaccagccgtatagcgaacgtctgattgttaaaacccctaaaggtattaccgtggaaaaagcaaccctgctgaccaccggcgaagatattaccgttgtggaaaccacccgtaatgaatataatgttagtgttccgaaaaagaacccgggcgaaccgtatgttattcagctgaaagttcgtgcagccaaaggcaccaaaagtatttatcgtgatgccctgacgggtacctggtctcatccgcagttcgagaaataa

SEQ ID NO: 114 - protein, 1460 aa, Artificial Sequence
  SYNTHETIC FUSION PROTEN
MGSSHHHHHHSSGLVPRGSHMTHHDSLNTVKAEEKTVQVQKGLPSIDSLHYLSENSKKEFKEELSKAGQESQKVKEILAKAQQADKQAQELAKMKIPEKIPMKPLHGSLYGGYFRTWHDKTSDPTEKDKVNSMGELPKEVDLAFIFHDWTKDYSLFWKELATKHVPKLNKQGTRVIRTIPWRFLAGGDNSGIAEDTSKYPNTPEGNKALAKAIVDEYVYKYNLDGLDVDVEHDSIPKVDKKEDTAGVERSIQVFEEIGKLIGPKGVDKSRLFIMDSTYMADKNPLIERGAPYINLLLVQVYGSQGEKGGWEPVSNRPEKTMEERWQGYSKYIRPEQYMIGFSFYEENAQEGNLWYDINSRKDEDKANGINTDITGTRAERYARWQPKTGGVKGGIFSYAIDRDGVAHQPKKYAKQKEFKDATDNIFHSDYSVSKALKTVMLKDKSYDLIDEKDFPDKALREAVMAQVGTRKGDLERFNGTLRLDNPAIQSLEGLNKFKKLAQLDLIGLSRITKLDRSVLPANMKPGKDTLETVLETYKKDNKEEPATIPPVSLKVSGLTGLKELDLSGFDRETLAGLDAATLTSLEKVDISGNKLDLAPGTENRQIFDTMLSTISNHVGSNEQTVKFDKQKPTGHYPDTYGKTSLRLPVANEKVDLQSQLLFGTVTNQGTLINSEADYKAYQNHKIAGRSFVDSNYHYNNFKVSYENYTVKVTDSTLGTTTDKTLATDKEETYKVDFFSPADKTKAVHTAKVIVGDEKTMMVNLAEGATVIGGSADPVNARKVFDGQLGSETDNISLGWDSKQSIIFKLKEDGLIKHWRFFNDSARNPETTNKPIQEASLQIFNIKDYNLDNLLENPNKFDDEKYWITVDTYSAQGERATAFSNTLNNITSKYWRVVFDTKGDRYSSPVVPELQILGYPLPNADTIMKTVTTAKELSQQKDKFSQKMLDELKIKEMALETSLNSKIFDVTAINANAGVLKDCIEKRQLLKKGSGAQEAKKEIPLKYGATNEGKRQDPAMQKFRDNRLGAFIHWGLYAIPGGEWNGKVYGGAAEWLKSWAKVPADEWLKLMDQWNPTKFDAKKWAKMAKEMGTKYVKITTKHHEGFCLWPSKYTKYTVANTPYKRDILGELVKAYNDEGIDVHFYFSVMDWSNPDYRYDIKSKEDSIAFSRFLEFTDNQLKELATRYPTVKDFWFDGTWDASVKKNGWWTAHAEQMLKELVPGVAINSRLRADDKGKRHFDSNGRLMGDYESGYERRLPDPVKDLKVTQWDWEACMTIPENQWGYHKDWSLSYVKTPIEVIDRIVHAVSMGGNMVVNFGPQADGDFRPEEKAMATAIGKWMNRYGKAVYACDYAGFEKQDWGYYTRGKNDEVYMVVFNQPYSERLIVKTPKGITVEKATLLTTGEDITVVETTRNEYNVSVPKKNPGEPYVIQLKVRAAKGTKSIYRDALTGTWSHPQFEK

SEQ ID NO: 115 - DNA, 4383 bp, Artificial Sequence
  SYNTHETIC FUSION PROTEN
atgggcagcagccatcatcatcatcatcacagcagcggcctggtgccgcgcggcagccatatgacccaccatgattcactcaatactgtaaaagcggaggagaagactgttcaggttcagaaaggattaccttctatcgatagcttgcattatctgtcagagaatagcaaaaaagaatttaaagaagaactctcaaaagcggggcaagaatctcaaaaggtcaaagagatattagcaaaagctcagcaggcagataaacaagctcaagaacttgccaaaatgaaaattcctgagaaaataccgatgaaaccgttacatggttctctctacggtggttactttagaacttggcatgacaaaacatcagatccaacagaaaaagacaaagttaactcgatgggagagcttcctaaagaagtagatctagcctttattttccacgattggacaaaagattatagccttttttggaaagaattggccaccaaacatgtgccaaagttaaacaagcaagggacacgtgtcattcgtaccattccatggcgtttcctagctgggggtgataacagtggtattgcagaagataccagtaaatacccaaatacaccagagggaaataaagctttagccaaagctattgttgatgaatatgtttataaatacaaccttgatggcttagatgtgcaggttgaacatgatagtattccaaaagttgacaaaaaagaagatacagcaggcgtagaacgctctattcaagtgtttgaagaaattgggaaattaattggaccaaaaggtgttgataaatcgcggttatttattatggatagcacctacatggctgataaaaacccattgattgagcgaggagctccttatattaatttattactggtacaggtctatggttcacaaggagagaaaggtggttgggagcctgtttctaatcgacctgaaaaaacaatggaagaacgatggcaaggttatagcaagtatattcgtcctgaacaatacatgattggtttttctttctatgaggaaaatgctcaagaagggaatctttggtatgatattaattctcgcaaggacgaggacaaagcaaatggaattaacactgacataactggaacgcgtgccgaacggtatgcaaggtggcaacctaagacaggtggggttaagggaggtatcttctcctacgctattgaccgagatggtgtagctcatcaacctaaaaaatatgctaaacagaaagagtttaaggacgcaactgataacatcttccactcagattatagtgtctccaaggcattaaagacagttatgctaaaagataagtcgtatgatctgattgatgagaaagatttcccagataaggctttgcgagaagctgtgatggcgcaggttggaaccagaaaaggtgatttggaacgtttcaatggcacattacgattggataatccagcgattcaaagtttagaaggtctaaataaatttaaaaaattagctcaattagacttgattggcttatctcgcattacaaagctcgaccgttctgttttacccgctaatatgaagccaggcaaagataccttggaaacagttcttgaaacctataaaaaggataacaaagaagaacctgctactatcccaccagtatctttgaaggtttctggtttaactggtctgaaagaattagatttgtcaggttttgaccgtgaaaccttggctggtcttgatgccgctactctaacgtctttagaaaaagttgatatttctggcaacaaacttgatttggctccaggaacagaaaatcgacaaatttttgatactatgctatcaactatcagcaatcatgttggaagcaatgaacaaacagtgaaatttgacaagcaaaaaccaactgggcattacccagatacctatgggaaaactagtctgcgcttaccagtggcaaatgaaaaagttgatttgcaaagccagcttttgtttgggactgtgacaaatcaaggaaccctaatcaatagcgaagcagactataaggcttaccaaaatcataaaattgctggacgtagctttgttgattcaaactatcattacaataactttaaagtttcttatgagaactataccgttaaagtaactgattccacattgggaaccactactgacaaaacgctagcaactgataaagaagagacctataaggttgacttctttagcccagcagataagacaaaagctgttcatactgctaaagtgattgttggtgacgaaaaaaccatgatggttaatttggcagaaggcgcaacagttattggaggaagtgctgatcctgtaaatgcaagaaaggtatttgatgggcaactgggcagtgagactgataatatctctttaggatgggattctaagcaaagtattatatttaaattgaaagaagatggattaataaagcattggcgtttcttcaatgattcagcccgaaatcctgagacaaccaataaacctattcaggaagcaagtctacaaatttttaatatcaaagattataatctagataatttgttggaaaatcccaataaatttgatgatgaaaaatattggattactgtagatacttacagtgcacaaggagagagagctactgcattcagtaatacattaaataatattactagtaaatattggcgagttgtctttgatactaaaggagatagatatagttcgccagtagtccctgaactccaaattttaggttatccgttacctaacgccgacactatcatgaaaacagtaactactgctaaagagttatctcaacaaaaagataagttttctcaaaagatgcttgatgagttaaaaataaaagagatggctttagaaacttctttgaacagtaagatttttgatgtaactgctattaatgctaatgctggagttttgaaagattgtattgagaaaaggcagctgctaaaaaaaggatccggtgctcaggaagcaaaaaaagaaattccgctgaaatatggcgccaccaatgaaggtaaacgtcaggaccctgccatgcagaaatttcgtgataatcgtctgggcgcatttattcattggggcctgtatgcaattccgggtggtgaatggaatggtaaagtgtatggtggtgcagcagaatggctgaaaagttgggcaaaagttccggccgatgaatggctgaagctgatggatcagtggaatccgaccaaatttgatgcaaaaaaatgggccaaaatggccaaagaaatgggcaccaaatatgtgaaaattaccaccaaacatcacgaaggcttttgcctgtggccgagtaaatataccaaatataccgtggccaataccccgtataaacgtgatattctgggcgaactggttaaagcctataatgatgaaggtattgatgttcatttctactttagcgtgatggattggagcaatccggattatcgttatgatattaaaagcaaagaggacagtatcgcctttagtcgctttctggaatttaccgataatcagctgaaagaactggccacccgttatccgaccgttaaagatttttggtttgatggtacctgggatgcaagcgtgaaaaaaaatggttggtggaccgcacatgcagaacagatgctgaaagaattagttccgggtgttgcaattaatagtcgcctgcgtgcagatgataaaggtaaacgtcattttgatagcaatggccgtctgatgggcgattatgaaagtggttatgaacgtcgtctgccggaccctgtgaaagatctgaaagtgacccagtgggattgggaagcatgcatgaccattccggaaaatcagtggggctatcataaagattggagtctgagttatgttaaaaccccgattgaagtgattgatcgtattgtgcatgccgttagcatgggtggtaatatggtggtgaattttggtccgcaggcagatggtgattttcgtccggaagaaaaagcaatggcaaccgcaattggtaaatggatgaatcgctatggtaaagcagtttatgcctgtgattatgccggttttgaaaaacaggattggggttattatacccgcggtaaaaatgatgaagtttatatggttgtgttcaaccagccgtatagcgaacgtctgattgttaaaacccctaaaggtattaccgtggaaaaagcaaccctgctgaccaccggcgaagatattaccgttgtggaaaccacccgtaatgaatataatgttagtgttccgaaaaagaacccgggcgaaccgtatgttattcagctgaaagttcgtgcagccaaaggcaccaaaagtatttatcgtgatgccctgacgggtacctggtctcatccgcagttcgagaaataa

SEQ ID NO: 116 - protein, 1460 aa, Artificial Sequence
  SYNTHETIC FUSION PROTEN
MGSSHHHHHHSSGLVPRGSHMTHHDSLNTVKAEEKTVQVQKGLPSIDSLHYLSENSKKEFKEELSKAGQESQKVKEILAKAQQADKQAQELAKMKIPEKIPMKPLHGSLYGGYFRTWHDKTSDPTEKDKVNSMGELPKEVDLAFIFHDWTKDYSLFWKELATKHVPKLNKQGTRVIRTIPWRFLAGGDNSGIAEDTSKYPNTPEGNKALAKAIVDEYVYKYNLDGLDVQVEHDSIPKVDKKEDTAGVERSIQVFEEIGKLIGPKGVDKSRLFIMDSTYMADKNPLIERGAPYINLLLVQVYGSQGEKGGWEPVSNRPEKTMEERWQGYSKYIRPEQYMIGFSFYEENAQEGNLWYDINSRKDEDKANGINTDITGTRAERYARWQPKTGGVKGGIFSYAIDRDGVAHQPKKYAKQKEFKDATDNIFHSDYSVSKALKTVMLKDKSYDLIDEKDFPDKALREAVMAQVGTRKGDLERFNGTLRLDNPAIQSLEGLNKFKKLAQLDLIGLSRITKLDRSVLPANMKPGKDTLETVLETYKKDNKEEPATIPPVSLKVSGLTGLKELDLSGFDRETLAGLDAATLTSLEKVDISGNKLDLAPGTENRQIFDTMLSTISNHVGSNEQTVKFDKQKPTGHYPDTYGKTSLRLPVANEKVDLQSQLLFGTVTNQGTLINSEADYKAYQNHKIAGRSFVDSNYHYNNFKVSYENYTVKVTDSTLGTTTDKTLATDKEETYKVDFFSPADKTKAVHTAKVIVGDEKTMMVNLAEGATVIGGSADPVNARKVFDGQLGSETDNISLGWDSKQSIIFKLKEDGLIKHWRFFNDSARNPETTNKPIQEASLQIFNIKDYNLDNLLENPNKFDDEKYWITVDTYSAQGERATAFSNTLNNITSKYWRVVFDTKGDRYSSPVVPELQILGYPLPNADTIMKTVTTAKELSQQKDKFSQKMLDELKIKEMALETSLNSKIFDVTAINANAGVLKDCIEKRQLLKKGSGAQEAKKEIPLKYGATNEGKRQDPAMQKFRDNRLGAFIHWGLYAIPGGEWNGKVYGGAAEWLKSWAKVPADEWLKLMDQWNPTKFDAKKWAKMAKEMGTKYVKITTKHHEGFCLWPSKYTKYTVANTPYKRDILGELVKAYNDEGIDVHFYFSVMDWSNPDYRYDIKSKEDSIAFSRFLEFTDNQLKELATRYPTVKDFWFDGTWDASVKKNGWWTAHAEQMLKELVPGVAINSRLRADDKGKRHFDSNGRLMGDYESGYERRLPDPVKDLKVTQWDWEACMTIPENQWGYHKDWSLSYVKTPIEVIDRIVHAVSMGGNMVVNFGPQADGDFRPEEKAMATAIGKWMNRYGKAVYACDYAGFEKQDWGYYTRGKNDEVYMVVFNQPYSERLIVKTPKGITVEKATLLTTGEDITVVETTRNEYNVSVPKKNPGEPYVIQLKVRAAKGTKSIYRDALTGTWSHPQFEK

SEQ ID NO: 117 - DNA, 3894 bp, Artificial Sequence
  SYNTHETIC FUSION PROTEN
atgggcagcagccatcatcatcatcatcacagcagcggcctggtgccgcgcggcagccatatggaggagaagactgttcaaacaggaaagacagatcagcaggttggtgctaaattggtacaggaaatccgtgaaggaaaacgcggaccactatatgctggttattttaggacatggcatgatcgtgcttcaacaggaatagatggtaaacagcaacatccagaaaatactatggctgaggtcccaaaagaagttgatatcttatttgtttttcatgaccatacagcttcagatagtccattttggtctgaattaaaggacagttatgtccataaattacatcaacagggaacggcacttgttcagacaattggtgttaacgaattaaatggacgtacaggtttatctaaagattatcctgatactcctgaggggaacaaagctttagcagcagccattgtcaaggcatttgtaactgatcgtggtgtcgatggactagatattgatattgagcacgaatttacgaacaaaagaacacctgaagaagatgctcgtgctctaaatgtttttaaagagattgcgcagttaataggtaaaaatggtagtgataaatctaaattgctcatcatggacactaccctaagtgttgaaaataatccaatatttaaagggatagcggaagatcttgattatcttcttagacaatattatggttcacaaggtggagaagctgaagtggatactataaactctgattggaaccaatatcagaattatattgatgctagccagttcatgattggattctccttttttgaagaatctgcgtccaaagggaatttatggtttgatgttaacgaatacgaccctaacaatcctgaaaaagggaaagatattgaaggaacacgtgctaaaaaatatgcagagtggcaacctagtacaggtggtttaaaagcaggtatattctcttatgctattgatcgtgatggagtggctcatgttccttcaacatataaaaataggactagtacaaatttacaacggcatgaagtcgataatatctcacatactgactacaccgtatctcgaaaattaaaaacattgatgaccgaagacaaacgctatgatgtcattgatcaaaaagacattcctgacccagcattaagagaacaaatcattcaacaagttggacagtataaaggcgatttggaacgttataacaagacattggtgcttacaggagataagattcaaaatcttaaaggactagaaaaattaagcaagttacaaaaattagagttgcgccagctatctaacgttaaagaaattactccagaacttttgccggaaagcatgaaaaaagatgctgagcttgttatggtaggcatgactggtttagaaaaactaaaccttagtggtctaaatcgtcaaactttagacggtatagacgtgaatagtattacgcatttgacatcatttgatatttcacataatagtttggacttgtcggaaaagagtgaagaccgtaaactattaatgactttgatggagcaggtttcaaatcatcaaaaaataacggtgaaaaatacggcttttgaaaatcaaaaaccgaaaggttattatcctcagacgtatgataccaaagaaggtcattatgatgttgataatgcagaacatgatattttaactgattttgtttttggaactgttactaaacgtaatacctttattggagacgaagaagcatttgctatctataaagaaggagctgtcgatggtcgacaatatgtgtctaaagactatacttatgaagcttttcgtaaagactataaaggttacaaggttcatttaactgcttctaacctaggagaaacagttacttctaaggtaactgctactactgatgaaacttacttagtagatgtttctgatggggaaaaagttgttcaccacatgaaactcaatataggatctggtgccatcatgatggaaaatctggcaaaaggggctaaagtgattggtacatctggggactttgagcaagcaaagaagattttcgatggtgaaaagtcagatagattcttcacttggggacaaactaactggatagcttttgatctaggagaaattaatcttgcgaaggaatggcgtttatttaatgcagagacaaatactgaaataaagacagatagtagcttaaacgtggctaaaggacgtcttcagattttaaaagatacaactattgatttagaaaaaatggacataaaaaatcgtaaagagtatctgtcgaatgatgaaaattggactgatgttgctcagatggatgatgcaaaagcgatatttaatagtaaattatccaatgttttatctcggtattggcggttttgtgtagatggtggagctagctcttattaccctcaatataccgaacttcaaatcctcggacaacgtttatcaaatgatgtcgctaatacgctgaaggatggatccggtgctcaggaagcaaaaaaagaaattccgctgaaatatggcgccaccaatgaaggtaaacgtcaggaccctgccatgcagaaatttcgtgataatcgtctgggcgcatttattcattggggcctgtatgcaattccgggtggtgaatggaatggtaaagtgtatggtggtgcagcagaatggctgaaaagttgggcaaaagttccggccgatgaatggctgaagctgatggatcagtggaatccgaccaaatttgatgcaaaaaaatgggccaaaatggccaaagaaatgggcaccaaatatgtgaaaattaccaccaaacatcacgaaggcttttgcctgtggccgagtaaatataccaaatataccgtggccaataccccgtataaacgtgatattctgggcgaactggttaaagcctataatgatgaaggtattgatgttcatttctactttagcgtgatggattggagcaatccggattatcgttatgatattaaaagcaaagaggacagtatcgcctttagtcgctttctggaatttaccgataatcagctgaaagaactggccacccgttatccgaccgttaaagatttttggtttgatggtacctgggatgcaagcgtgaaaaaaaatggttggtggaccgcacatgcagaacagatgctgaaagaattagttccgggtgttgcaattaatagtcgcctgcgtgcagatgataaaggtaaacgtcattttgatagcaatggccgtctgatgggcgattatgaaagtggttatgaacgtcgtctgccggaccctgtgaaagatctgaaagtgacccagtgggattgggaagcatgcatgaccattccggaaaatcagtggggctatcataaagattggagtctgagttatgttaaaaccccgattgaagtgattgatcgtattgtgcatgccgttagcatgggtggtaatatggtggtgaattttggtccgcaggcagatggtgattttcgtccggaagaaaaagcaatggcaaccgcaattggtaaatggatgaatcgctatggtaaagcagtttatgcctgtgattatgccggttttgaaaaacaggattggggttattatacccgcggtaaaaatgatgaagtttatatggttgtgttcaaccagccgtatagcgaacgtctgattgttaaaacccctaaaggtattaccgtggaaaaagcaaccctgctgaccaccggcgaagatattaccgttgtggaaaccacccgtaatgaatataatgttagtgttccgaaaaagaacccgggcgaaccgtatgttattcagctgaaagttcgtgcagccaaaggcaccaaaagtatttatcgtgatgccctgacgagtacctggtctcatccgcagttcgagaaataa

SEQ ID NO: 118 - protein, 1297 aa, Artificial Sequence
  SYNTHETIC FUSION PROTEN
MGSSHHHHHHSSGLVPRGSHMEEKTVQTGKTDQQVGAKLVQEIREGKRGPLYAGYFRTWHDRASTGIDGKQQHPENTMAEVPKEVDILFVFHDHTASDSPFWSELKDSYVHKLHQQGTALVQTIGVNELNGRTGLSKDYPDTPEGNKALAAAIVKAFVTDRGVDGLDIDIEHEFTNKRTPEEDARALNVFKEIAQLIGKNGSDKSKLLIMDTTLSVENNPIFKGIAEDLDYLLRQYYGSQGGEAEVDTINSDWNQYQNYIDASQFMIGFSFFEESASKGNLWFDVNEYDPNNPEKGKDIEGTRAKKYAEWQPSTGGLKAGIFSYAIDRDGVAHVPSTYKNRTSTNLQRHEVDNISHTDYTVSRKLKTLMTEDKRYDVIDQKDIPDPALREQIIQQVGQYKGDLERYNKTLVLTGDKIQNLKGLEKLSKLQKLELRQLSNVKEITPELLPESMKKDAELVMVGMTGLEKLNLSGLNRQTLDGIDVNSITHLTSFDISHNSLDLSEKSEDRKLLMTLMEQVSNHQKITVKNTAFENQKPKGYYPQTYDTKEGHYDVDNAEHDILTDFVFGTVTKRNTFIGDEEAFAIYKEGAVDGRQYVSKDYTYEAFRKDYKGYKVHLTASNLGETVTSKVTATTDETYLVDVSDGEKVVHHMKLNIGSGAIMMENLAKGAKVIGTSGDFEQAKKIFDGEKSDRFFTWGQTNWIAFDLGEINLAKEWRLFNAETNTEIKTDSSLNVAKGRLQILKDTTIDLEKMDIKNRKEYLSNDENWTDVAQMDDAKAIFNSKLSNVLSRYWRFCVDGGASSYYPQYTELQILGQRLSNDVANTLKDGSGAQEAKKEIPLKYGATNEGKRQDPAMQKFRDNRLGAFIHWGLYAIPGGEWNGKVYGGAAEWLKSWAKVPADEWLKLMDQWNPTKFDAKKWAKMAKEMGTKYVKITTKHHEGFCLWPSKYTKYTVANTPYKRDILGELVKAYNDEGIDVHFYFSVMDWSNPDYRYDIKSKEDSIAFSRFLEFTDNQLKELATRYPTVKDFWFDGTWDASVKKNGWWTAHAEQMLKELVPGVAINSRLRADDKGKRHFDSNGRLMGDYESGYERRLPDPVKDLKVTQWDWEACMTIPENQWGYHKDWSLSYVKTPIEVIDRIVHAVSMGGNMVVNFGPQADGDFRPEEKAMATAIGKWMNRYGKAVYACDYAGFEKQDWGYYTRGKNDEVYMVVFNQPYSERLIVKTPKGITVEKATLLTTGEDITVVETTRNEYNVSVPKKNPGEPYVIQLKVRAAKGTKSIYRDALTSTWSHPQFEK

SEQ ID NO: 119 - DNA, 3894 bp, Artificial Sequence
  SYNTHETIC FUSION PROTEN
atgggcagcagccatcatcatcatcatcacagcagcggcctggtgccgcgcggcagccatatggaggagaagactgttcaaacaggaaagacagatcagcaggttggtgctaaattggtacaggaaatccgtgaaggaaaacgcggaccactatatgctggttattttaggacatggcatgatcgtgcttcaacaggaatagatggtaaacagcaacatccagaaaatactatggctgaggtcccaaaagaagttgatatcttatttgtttttcatgaccatacagcttcagatagtccattttggtctgaattaaaggacagttatgtccataaattacatcaacagggaacggcacttgttcaggaaattggtgttaacgaattaaatggacgtacaggtttatctaaagattatcctgatactcctgaggggaacaaagctttagcagcagccattgtcaaggcatttgtaactgatcgtggtgtcgatggactagatattgatattgagcacgaatttacgaacaaaagaacacctgaagaagatgctcgtgctctaaatgtttttaaagagattgcgcagttaataggtaaaaatggtagtgataaatctaaattgctcatcatggacactaccctaagtgttgaaaataatccaatatttaaagggatagcggaagatcttgattatcttcttagacaatattatggttcacaaggtggagaagctgaagtggatactataaactctgattggaaccaatatcagaattatattgatgctagccagttcatgattggattctccttttttgaagaatctgcgtccaaagggaatttatggtttgatgttaacgaatacgaccctaacaatcctgaaaaagggaaagatattgaaggaacacgtgctaaaaaatatgcagagtggcaacctagtacaggtggtttaaaagcaggtatattctcttatgctattgatcgtgatggagtggctcatgttccttcaacatataaaaataggactagtacaaatttacaacggcatgaagtcgataatatctcacatactgactacaccgtatctcgaaaattaaaaacattgatgaccgaagacaaacgctatgatgtcattgatcaaaaagacattcctgacccagcattaagagaacaaatcattcaacaagttggacagtataaaggcgatttggaacgttataacaagacattggtgcttacaggagataagattcaaaatcttaaaggactagaaaaattaagcaagttacaaaaattagagttgcgccagctatctaacgttaaagaaattactccagaacttttgccggaaagcatgaaaaaagatgctgagcttgttatggtaggcatgactggtttagaaaaactaaaccttagtggtctaaatcgtcaaactttagacggtatagacgtgaatagtattacgcatttgacatcatttgatatttcacataatagtttggacttgtcggaaaagagtgaagaccgtaaactattaatgactttgatggagcaggtttcaaatcatcaaaaaataacggtgaaaaatacggcttttgaaaatcaaaaaccgaaaggttattatcctcagacgtatgataccaaagaaggtcattatgatgttgataatgcagaacatgatattttaactgattttgtttttggaactgttactaaacgtaatacctttattggagacgaagaagcatttgctatctataaagaaggagctgtcgatggtcgacaatatgtgtctaaagactatacttatgaagcttttcgtaaagactataaaggttacaaggttcatttaactgcttctaacctaggagaaacagttacttctaaggtaactgctactactgatgaaacttacttagtagatgtttctgatggggaaaaagttgttcaccacatgaaactcaatataggatctggtgccatcatgatggaaaatctggcaaaaggggctaaagtgattggtacatctggggactttgagcaagcaaagaagattttcgatggtgaaaagtcagatagattcttcacttggggacaaactaactggatagcttttgatctaggagaaattaatcttgcgaaggaatggcgtttatttaatgcagagacaaatactgaaataaagacagatagtagcttaaacgtggctaaaggacgtcttcagattttaaaagatacaactattgatttagaaaaaatggacataaaaaatcgtaaagagtatctgtcgaatgatgaaaattggactgatgttgctcagatggatgatgcaaaagcgatatttaatagtaaattatccaatgttttatctcggtattggcggttttgtgtagatggtggagctagctcttattaccctcaatataccgaacttcaaatcctcggacaacgtttatcaaatgatgtcgctaatacgctgaaggatggatccggtgctcaggaagcaaaaaaagaaattccgctgaaatatggcgccaccaatgaaggtaaacgtcaggaccctgccatgcagaaatttcgtgataatcgtctgggcgcatttattcattggggcctgtatgcaattccgggtggtgaatggaatggtaaagtgtatggtggtgcagcagaatggctgaaaagttgggcaaaagttccggccgatgaatggctgaagctgatggatcagtggaatccgaccaaatttgatgcaaaaaaatgggccaaaatggccaaagaaatgggcaccaaatatgtgaaaattaccaccaaacatcacgaaggcttttgcctgtggccgagtaaatataccaaatataccgtggccaataccccgtataaacgtgatattctgggcgaactggttaaagcctataatgatgaaggtattgatgttcatttctactttagcgtgatggattggagcaatccggattatcgttatgatattaaaagcaaagaggacagtatcgcctttagtcgctttctggaatttaccgataatcagctgaaagaactggccacccgttatccgaccgttaaagatttttggtttgatggtacctgggatgcaagcgtgaaaaaaaatggttggtggaccgcacatgcagaacagatgctgaaagaattagttccgggtgttgcaattaatagtcgcctgcgtgcagatgataaaggtaaacgtcattttgatagcaatggccgtctgatgggcgattatgaaagtggttatgaacgtcgtctgccggaccctgtgaaagatctgaaagtgacccagtgggattgggaagcatgcatgaccattccggaaaatcagtggggctatcataaagattggagtctgagttatgttaaaaccccgattgaagtgattgatcgtattgtgcatgccgttagcatgggtggtaatatggtggtgaattttggtccgcaggcagatggtgattttcgtccggaagaaaaagcaatggcaaccgcaattggtaaatggatgaatcgctatggtaaagcagtttatgcctgtgattatgccggttttgaaaaacaggattggggttattatacccgcggtaaaaatgatgaagtttatatggttgtgttcaaccagccgtatagcgaacgtctgattgttaaaacccctaaaggtattaccgtggaaaaagcaaccctgctgaccaccggcgaagatattaccgttgtggaaaccacccgtaatgaatataatgttagtgttccgaaaaagaacccgggcgaaccgtatgttattcagctgaaagttcgtgcagccaaaggcaccaaaagtatttatcgtgatgccctgacgagtacctggtctcatccgcagttcgagaaataa

SEQ ID NO: 120 - protein, 1297 aa, Artificial Sequence
  SYNTHETIC FUSION PROTEN
MGSSHHHHHHSSGLVPRGSHMEEKTVQTGKTDQQVGAKLVQEIREGKRGPLYAGYFRTWHDRASTGIDGKQQHPENTMAEVPKEVDILFVFHDHTASDSPFWSELKDSYVHKLHQQGTALVQEIGVNELNGRTGLSKDYPDTPEGNKALAAAIVKAFVTDRGVDGLDIDIEHEFTNKRTPEEDARALNVFKEIAQLIGKNGSDKSKLLIMDTTLSVENNPIFKGIAEDLDYLLRQYYGSQGGEAEVDTINSDWNQYQNYIDASQFMIGFSFFEESASKGNLWFDVNEYDPNNPEKGKDIEGTRAKKYAEWQPSTGGLKAGIFSYAIDRDGVAHVPSTYKNRTSTNLQRHEVDNISHTDYTVSRKLKTLMTEDKRYDVIDQKDIPDPALREQIIQQVGQYKGDLERYNKTLVLTGDKIQNLKGLEKLSKLQKLELRQLSNVKEITPELLPESMKKDAELVMVGMTGLEKLNLSGLNRQTLDGIDVNSITHLTSFDISHNSLDLSEKSEDRKLLMTLMEQVSNHQKITVKNTAFENQKPKGYYPQTYDTKEGHYDVDNAEHDILTDFVFGTVTKRNTFIGDEEAFAIYKEGAVDGRQYVSKDYTYEAFRKDYKGYKVHLTASNLGETVTSKVTATTDETYLVDVSDGEKVVHHMKLNIGSGAIMMENLAKGAKVIGTSGDFEQAKKIFDGEKSDRFFTWGQTNWIAFDLGEINLAKEWRLFNAETNTEIKTDSSLNVAKGRLQILKDTTIDLEKMDIKNRKEYLSNDENWTDVAQMDDAKAIFNSKLSNVLSRYWRFCVDGGASSYYPQYTELQILGQRLSNDVANTLKDGSGAQEAKKEIPLKYGATNEGKRQDPAMQKFRDNRLGAFIHWGLYAIPGGEWNGKVYGGAAEWLKSWAKVPADEWLKLMDQWNPTKFDAKKWAKMAKEMGTKYVKITTKHHEGFCLWPSKYTKYTVANTPYKRDILGELVKAYNDEGIDVHFYFSVMDWSNPDYRYDIKSKEDSIAFSRFLEFTDNQLKELATRYPTVKDFWFDGTWDASVKKNGWWTAHAEQMLKELVPGVAINSRLRADDKGKRHFDSNGRLMGDYESGYERRLPDPVKDLKVTQWDWEACMTIPENQWGYHKDWSLSYVKTPIEVIDRIVHAVSMGGNMVVNFGPQADGDFRPEEKAMATAIGKWMNRYGKAVYACDYAGFEKQDWGYYTRGKNDEVYMVVFNQPYSERLIVKTPKGITVEKATLLTTGEDITVVETTRNEYNVSVPKKNPGEPYVIQLKVRAAKGTKSIYRDALTSTWSHPQFEK

SEQ ID NO: 121 - DNA, 3894 bp, Artificial Sequence
  SYNTHETIC FUSION PROTEN
atgggcagcagccatcatcatcatcatcacagcagcggcctggtgccgcgcggcagccatatggaggagaagactgttcaaacaggaaagacagatcagcaggttggtgctaaattggtacaggaaatccgtgaaggaaaacgcggaccactatatgctggttattttaggacatggcatgatcgtgcttcaacaggaatagatggtaaacagcaacatccagaaaatactatggctgaggtcccaaaagaagttgatatcttatttgtttttcatgaccatacagcttcagatagtccattttggtctgaattaaaggacagttatgtccataaattacatcaacagggaacggcacttgttcagatgattggtgttaacgaattaaatggacgtacaggtttatctaaagattatcctgatactcctgaggggaacaaagctttagcagcagccattgtcaaggcatttgtaactgatcgtggtgtcgatggactagatattgatattgagcacgaatttacgaacaaaagaacacctgaagaagatgctcgtgctctaaatgtttttaaagagattgcgcagttaataggtaaaaatggtagtgataaatctaaattgctcatcatggacactaccctaagtgttgaaaataatccaatatttaaagggatagcggaagatcttgattatcttcttagacaatattatggttcacaaggtggagaagctgaagtggatactataaactctgattggaaccaatatcagaattatattgatgctagccagttcatgattggattctccttttttgaagaatctgcgtccaaagggaatttatggtttgatgttaacgaatacgaccctaacaatcctgaaaaagggaaagatattgaaggaacacgtgctaaaaaatatgcagagtggcaacctagtacaggtggtttaaaagcaggtatattctcttatgctattgatcgtgatggagtggctcatgttccttcaacatataaaaataggactagtacaaatttacaacggcatgaagtcgataatatctcacatactgactacaccgtatctcgaaaattaaaaacattgatgaccgaagacaaacgctatgatgtcattgatcaaaaagacattcctgacccagcattaagagaacaaatcattcaacaagttggacagtataaaggcgatttggaacgttataacaagacattggtgcttacaggagataagattcaaaatcttaaaggactagaaaaattaagcaagttacaaaaattagagttgcgccagctatctaacgttaaagaaattactccagaacttttgccggaaagcatgaaaaaagatgctgagcttgttatggtaggcatgactggtttagaaaaactaaaccttagtggtctaaatcgtcaaactttagacggtatagacgtgaatagtattacgcatttgacatcatttgatatttcacataatagtttggacttgtcggaaaagagtgaagaccgtaaactattaatgactttgatggagcaggtttcaaatcatcaaaaaataacggtgaaaaatacggcttttgaaaatcaaaaaccgaaaggttattatcctcagacgtatgataccaaagaaggtcattatgatgttgataatgcagaacatgatattttaactgattttgtttttggaactgttactaaacgtaatacctttattggagacgaagaagcatttgctatctataaagaaggagctgtcgatggtcgacaatatgtgtctaaagactatacttatgaagcttttcgtaaagactataaaggttacaaggttcatttaactgcttctaacctaggagaaacagttacttctaaggtaactgctactactgatgaaacttacttagtagatgtttctgatggggaaaaagttgttcaccacatgaaactcaatataggatctggtgccatcatgatggaaaatctggcaaaaggggctaaagtgattggtacatctggggactttgagcaagcaaagaagattttcgatggtgaaaagtcagatagattcttcacttggggacaaactaactggatagcttttgatctaggagaaattaatcttgcgaaggaatggcgtttatttaatgcagagacaaatactgaaataaagacagatagtagcttaaacgtggctaaaggacgtcttcagattttaaaagatacaactattgatttagaaaaaatggacataaaaaatcgtaaagagtatctgtcgaatgatgaaaattggactgatgttgctcagatggatgatgcaaaagcgatatttaatagtaaattatccaatgttttatctcggtattggcggttttgtgtagatggtggagctagctcttattaccctcaatataccgaacttcaaatcctcggacaacgtttatcaaatgatgtcgctaatacgctgaaggatggatccggtgctcaggaagcaaaaaaagaaattccgctgaaatatggcgccaccaatgaaggtaaacgtcaggaccctgccatgcagaaatttcgtgataatcgtctgggcgcatttattcattggggcctgtatgcaattccgggtggtgaatggaatggtaaagtgtatggtggtgcagcagaatggctgaaaagttgggcaaaagttccggccgatgaatggctgaagctgatggatcagtggaatccgaccaaatttgatgcaaaaaaatgggccaaaatggccaaagaaatgggcaccaaatatgtgaaaattaccaccaaacatcacgaaggcttttgcctgtggccgagtaaatataccaaatataccgtggccaataccccgtataaacgtgatattctgggcgaactggttaaagcctataatgatgaaggtattgatgttcatttctactttagcgtgatggattggagcaatccggattatcgttatgatattaaaagcaaagaggacagtatcgcctttagtcgctttctggaatttaccgataatcagctgaaagaactggccacccgttatccgaccgttaaagatttttggtttgatggtacctgggatgcaagcgtgaaaaaaaatggttggtggaccgcacatgcagaacagatgctgaaagaattagttccgggtgttgcaattaatagtcgcctgcgtgcagatgataaaggtaaacgtcattttgatagcaatggccgtctgatgggcgattatgaaagtggttatgaacgtcgtctgccggaccctgtgaaagatctgaaagtgacccagtgggattgggaagcatgcatgaccattccggaaaatcagtggggctatcataaagattggagtctgagttatgttaaaaccccgattgaagtgattgatcgtattgtgcatgccgttagcatgggtggtaatatggtggtgaattttggtccgcaggcagatggtgattttcgtccggaagaaaaagcaatggcaaccgcaattggtaaatggatgaatcgctatggtaaagcagtttatgcctgtgattatgccggttttgaaaaacaggattggggttattatacccgcggtaaaaatgatgaagtttatatggttgtgttcaaccagccgtatagcgaacgtctgattgttaaaacccctaaaggtattaccgtggaaaaagcaaccctgctgaccaccggcgaagatattaccgttgtggaaaccacccgtaatgaatataatgttagtgttccgaaaaagaacccgggcgaaccgtatgttattcagctgaaagttcgtgcagccaaaggcaccaaaagtatttatcgtgatgccctgacgagtacctggtctcatccgcagttcgagaaataa

SEQ ID NO: 122 - protein, 1297 aa, Artificial Sequence
  SYNTHETIC FUSION PROTEN
MGSSHHHHHHSSGLVPRGSHMEEKTVQTGKTDQQVGAKLVQEIREGKRGPLYAGYFRTWHDRASTGIDGKQQHPENTMAEVPKEVDILFVFHDHTASDSPFWSELKDSYVHKLHQQGTALVQMIGVNELNGRTGLSKDYPDTPEGNKALAAAIVKAFVTDRGVDGLDIDIEHEFTNKRTPEEDARALNVFKEIAQLIGKNGSDKSKLLIMDTTLSVENNPIFKGIAEDLDYLLRQYYGSQGGEAEVDTINSDWNQYQNYIDASQFMIGFSFFEESASKGNLWFDVNEYDPNNPEKGKDIEGTRAKKYAEWQPSTGGLKAGIFSYAIDRDGVAHVPSTYKNRTSTNLQRHEVDNISHTDYTVSRKLKTLMTEDKRYDVIDQKDIPDPALREQIIQQVGQYKGDLERYNKTLVLTGDKIQNLKGLEKLSKLQKLELRQLSNVKEITPELLPESMKKDAELVMVGMTGLEKLNLSGLNRQTLDGIDVNSITHLTSFDISHNSLDLSEKSEDRKLLMTLMEQVSNHQKITVKNTAFENQKPKGYYPQTYDTKEGHYDVDNAEHDILTDFVFGTVTKRNTFIGDEEAFAIYKEGAVDGRQYVSKDYTYEAFRKDYKGYKVHLTASNLGETVTSKVTATTDETYLVDVSDGEKVVHHMKLNIGSGAIMMENLAKGAKVIGTSGDFEQAKKIFDGEKSDRFFTWGQTNWIAFDLGEINLAKEWRLFNAETNTEIKTDSSLNVAKGRLQILKDTTIDLEKMDIKNRKEYLSNDENWTDVAQMDDAKAIFNSKLSNVLSRYWRFCVDGGASSYYPQYTELQILGQRLSNDVANTLKDGSGAQEAKKEIPLKYGATNEGKRQDPAMQKFRDNRLGAFIHWGLYAIPGGEWNGKVYGGAAEWLKSWAKVPADEWLKLMDQWNPTKFDAKKWAKMAKEMGTKYVKITTKHHEGFCLWPSKYTKYTVANTPYKRDILGELVKAYNDEGIDVHFYFSVMDWSNPDYRYDIKSKEDSIAFSRFLEFTDNQLKELATRYPTVKDFWFDGTWDASVKKNGWWTAHAEQMLKELVPGVAINSRLRADDKGKRHFDSNGRLMGDYESGYERRLPDPVKDLKVTQWDWEACMTIPENQWGYHKDWSLSYVKTPIEVIDRIVHAVSMGGNMVVNFGPQADGDFRPEEKAMATAIGKWMNRYGKAVYACDYAGFEKQDWGYYTRGKNDEVYMVVFNQPYSERLIVKTPKGITVEKATLLTTGEDITVVETTRNEYNVSVPKKNPGEPYVIQLKVRAAKGTKSIYRDALTSTWSHPQFEK

SEQ ID NO: 123 - DNA, 3894 bp, Artificial Sequence
  SYNTHETIC FUSION PROTEN
atgggcagcagccatcatcatcatcatcacagcagcggcctggtgccgcgcggcagccatatggaggagaagactgttcaaacaggaaagacagatcagcaggttggtgctaaattggtacaggaaatccgtgaaggaaaacgcggaccactatatgctggttattttaggacatggcatgatcgtgcttcaacaggaatagatggtaaacagcaacatccagaaaatactatggctgaggtcccaaaagaagttgatatcttatttgtttttcatgaccatacagcttcagatagtccattttggtctgaattaaaggacagttatgtccataaattacatcaacagggaacggcacttgttcagacaattggtgttaacgaattaaatggacgtacaggtttatctaaagattatcctgatactcctgaggggaacaaagctttagcagcagccattgtcaaggcatttgtaactgatcgtggtgtcgatggactagatattatgattgagcacgaatttacgaacaaaagaacacctgaagaagatgctcgtgctctaaatgtttttaaagagattgcgcagttaataggtaaaaatggtagtgataaatctaaattgctcatcatggacactaccctaagtgttgaaaataatccaatatttaaagggatagcggaagatcttgattatcttcttagacaatattatggttcacaaggtggagaagctgaagtggatactataaactctgattggaaccaatatcagaattatattgatgctagccagttcatgattggattctccttttttgaagaatctgcgtccaaagggaatttatggtttgatgttaacgaatacgaccctaacaatcctgaaaaagggaaagatattgaaggaacacgtgctaaaaaatatgcagagtggcaacctagtacaggtggtttaaaagcaggtatattctcttatgctattgatcgtgatggagtggctcatgttccttcaacatataaaaataggactagtacaaatttacaacggcatgaagtcgataatatctcacatactgactacaccgtatctcgaaaattaaaaacattgatgaccgaagacaaacgctatgatgtcattgatcaaaaagacattcctgacccagcattaagagaacaaatcattcaacaagttggacagtataaaggcgatttggaacgttataacaagacattggtgcttacaggagataagattcaaaatcttaaaggactagaaaaattaagcaagttacaaaaattagagttgcgccagctatctaacgttaaagaaattactccagaacttttgccggaaagcatgaaaaaagatgctgagcttgttatggtaggcatgactggtttagaaaaactaaaccttagtggtctaaatcgtcaaactttagacggtatagacgtgaatagtattacgcatttgacatcatttgatatttcacataatagtttggacttgtcggaaaagagtgaagaccgtaaactattaatgactttgatggagcaggtttcaaatcatcaaaaaataacggtgaaaaatacggcttttgaaaatcaaaaaccgaaaggttattatcctcagacgtatgataccaaagaaggtcattatgatgttgataatgcagaacatgatattttaactgattttgtttttggaactgttactaaacgtaatacctttattggagacgaagaagcatttgctatctataaagaaggagctgtcgatggtcgacaatatgtgtctaaagactatacttatgaagcttttcgtaaagactataaaggttacaaggttcatttaactgcttctaacctaggagaaacagttacttctaaggtaactgctactactgatgaaacttacttagtagatgtttctgatggggaaaaagttgttcaccacatgaaactcaatataggatctggtgccatcatgatggaaaatctggcaaaaggggctaaagtgattggtacatctggggactttgagcaagcaaagaagattttcgatggtgaaaagtcagatagattcttcacttggggacaaactaactggatagcttttgatctaggagaaattaatcttgcgaaggaatggcgtttatttaatgcagagacaaatactgaaataaagacagatagtagcttaaacgtggctaaaggacgtcttcagattttaaaagatacaactattgatttagaaaaaatggacataaaaaatcgtaaagagtatctgtcgaatgatgaaaattggactgatgttgctcagatggatgatgcaaaagcgatatttaatagtaaattatccaatgttttatctcggtattggcggttttgtgtagatggtggagctagctcttattaccctcaatataccgaacttcaaatcctcggacaacgtttatcaaatgatgtcgctaatacgctgaaggatggatccggtgctcaggaagcaaaaaaagaaattccgctgaaatatggcgccaccaatgaaggtaaacgtcaggaccctgccatgcagaaatttcgtgataatcgtctgggcgcatttattcattggggcctgtatgcaattccgggtggtgaatggaatggtaaagtgtatggtggtgcagcagaatggctgaaaagttgggcaaaagttccggccgatgaatggctgaagctgatggatcagtggaatccgaccaaatttgatgcaaaaaaatgggccaaaatggccaaagaaatgggcaccaaatatgtgaaaattaccaccaaacatcacgaaggcttttgcctgtggccgagtaaatataccaaatataccgtggccaataccccgtataaacgtgatattctgggcgaactggttaaagcctataatgatgaaggtattgatgttcatttctactttagcgtgatggattggagcaatccggattatcgttatgatattaaaagcaaagaggacagtatcgcctttagtcgctttctggaatttaccgataatcagctgaaagaactggccacccgttatccgaccgttaaagatttttggtttgatggtacctgggatgcaagcgtgaaaaaaaatggttggtggaccgcacatgcagaacagatgctgaaagaattagttccgggtgttgcaattaatagtcgcctgcgtgcagatgataaaggtaaacgtcattttgatagcaatggccgtctgatgggcgattatgaaagtggttatgaacgtcgtctgccggaccctgtgaaagatctgaaagtgacccagtgggattgggaagcatgcatgaccattccggaaaatcagtggggctatcataaagattggagtctgagttatgttaaaaccccgattgaagtgattgatcgtattgtgcatgccgttagcatgggtggtaatatggtggtgaattttggtccgcaggcagatggtgattttcgtccggaagaaaaagcaatggcaaccgcaattggtaaatggatgaatcgctatggtaaagcagtttatgcctgtgattatgccggttttgaaaaacaggattggggttattatacccgcggtaaaaatgatgaagtttatatggttgtgttcaaccagccgtatagcgaacgtctgattgttaaaacccctaaaggtattaccgtggaaaaagcaaccctgctgaccaccggcgaagatattaccgttgtggaaaccacccgtaatgaatataatgttagtgttccgaaaaagaacccgggcgaaccgtatgttattcagctgaaagttcgtgcagccaaaggcaccaaaagtatttatcgtgatgccctgacgagtacctggtctcatccgcagttcgagaaataa

SEQ ID NO: 124 - protein, 1297 aa, Artificial Sequence
  SYNTHETIC FUSION PROTEN
MGSSHHHHHHSSGLVPRGSHMEEKTVQTGKTDQQVGAKLVQEIREGKRGPLYAGYFRTWHDRASTGIDGKQQHPENTMAEVPKEVDILFVFHDHTASDSPFWSELKDSYVHKLHQQGTALVQTIGVNELNGRTGLSKDYPDTPEGNKALAAAIVKAFVTDRGVDGLDIMIEHEFTNKRTPEEDARALNVFKEIAQLIGKNGSDKSKLLIMDTTLSVENNPIFKGIAEDLDYLLRQYYGSQGGEAEVDTINSDWNQYQNYIDASQFMIGFSFFEESASKGNLWFDVNEYDPNNPEKGKDIEGTRAKKYAEWQPSTGGLKAGIFSYAIDRDGVAHVPSTYKNRTSTNLQRHEVDNISHTDYTVSRKLKTLMTEDKRYDVIDQKDIPDPALREQIIQQVGQYKGDLERYNKTLVLTGDKIQNLKGLEKLSKLQKLELRQLSNVKEITPELLPESMKKDAELVMVGMTGLEKLNLSGLNRQTLDGIDVNSITHLTSFDISHNSLDLSEKSEDRKLLMTLMEQVSNHQKITVKNTAFENQKPKGYYPQTYDTKEGHYDVDNAEHDILTDFVFGTVTKRNTFIGDEEAFAIYKEGAVDGRQYVSKDYTYEAFRKDYKGYKVHLTASNLGETVTSKVTATTDETYLVDVSDGEKVVHHMKLNIGSGAIMMENLAKGAKVIGTSGDFEQAKKIFDGEKSDRFFTWGQTNWIAFDLGEINLAKEWRLFNAETNTEIKTDSSLNVAKGRLQILKDTTIDLEKMDIKNRKEYLSNDENWTDVAQMDDAKAIFNSKLSNVLSRYWRFCVDGGASSYYPQYTELQILGQRLSNDVANTLKDGSGAQEAKKEIPLKYGATNEGKRQDPAMQKFRDNRLGAFIHWGLYAIPGGEWNGKVYGGAAEWLKSWAKVPADEWLKLMDQWNPTKFDAKKWAKMAKEMGTKYVKITTKHHEGFCLWPSKYTKYTVANTPYKRDILGELVKAYNDEGIDVHFYFSVMDWSNPDYRYDIKSKEDSIAFSRFLEFTDNQLKELATRYPTVKDFWFDGTWDASVKKNGWWTAHAEQMLKELVPGVAINSRLRADDKGKRHFDSNGRLMGDYESGYERRLPDPVKDLKVTQWDWEACMTIPENQWGYHKDWSLSYVKTPIEVIDRIVHAVSMGGNMVVNFGPQADGDFRPEEKAMATAIGKWMNRYGKAVYACDYAGFEKQDWGYYTRGKNDEVYMVVFNQPYSERLIVKTPKGITVEKATLLTTGEDITVVETTRNEYNVSVPKKNPGEPYVIQLKVRAAKGTKSIYRDALTSTWSHPQFEK

SEQ ID NO: 125 - DNA, 3087 bp, Artificial Sequence
  SYNTHETIC FUSION PROTEN
atgggcagcagccatcatcatcatcatcacagcagcggcctggtgccgcgcggcagccatatgcaggaagcaaaaaaagaaattccgctgaaatatggcgccaccaatgaaggtaaacgtcaggaccctgccatgcagaaatttcgtgataatcgtctgggcgcatttattcattggggcctgtatgcaattccgggtggtgaatggaatggtaaagtgtatggtggtgcagcagaatggctgaaaagttgggcaaaagttccggccgatgaatggctgaagctgatggatcagtggaatccgaccaaatttgatgcaaaaaaatgggccaaaatggccaaagaaatgggcaccaaatatgtgaaaattaccaccaaacatcacgaaggcttttgcctgtggccgagtaaatataccaaatataccgtggccaataccccgtataaacgtgatattctgggcgaactggttaaagcctataatgatgaaggtattgatgttcatttctactttagcgtgatggattggagcaatccggattatcgttatgatattaaaagcaaagaggacagtatcgcctttagtcgctttctggaatttaccgataatcagctgaaagaactggccacccgttatccgaccgttaaagatttttggtttgatggtacctgggatgcaagcgtgaaaaaaaatggttggtggaccgcacatgcagaacagatgctgaaagaattagttccgggtgttgcaattaatagtcgcctgcgtgcagatgataaaggtaaacgtcattttgatagcaatggccgtctgatgggcgattatgaaagtggttatgaacgtcgtctgccggaccctgtgaaagatctgaaagtgacccagtgggattgggaagcatgcatgaccattccggaaaatcagtggggctatcataaagattggagtctgagttatgttaaaaccccgattgaagtgattgatcgtattgtgcatgccgttagcatgggtggtaatatggtggtgaattttggtccgcaggcagatggtgattttcgtccggaagaaaaagcaatggcaaccgcaattggtaaatggatgaatcgctatggtaaagcagtttatgcctgtgattatgccggttttgaaaaacaggattggggttattatacccgcggtaaaaatgatgaagtttatatggttgtgttcaaccagccgtatagcgaacgtctgattgttaaaacccctaaaggtattaccgtggaaaaagcaaccctgctgaccaccggcgaagatattaccgttgtggaaaccacccgtaatgaatataatgttagtgttccgaaaaagaacccgggcgaaccgtatgttattcagctgaaagttcgtgcagccaaaggcaccaaaagtatttatcgtgatgccctgacgggatccaaagataagtcgtatgatctgattgatgagaaagatttcccagataaggctttgcgagaagctgtgatggcgcaggttggaaccagaaaaggtgatttggaacgtttcaatggcacattacgattggataatccagcgattcaaagtttagaaggtctaaataaatttaaaaaattagctcaattagacttgattggcttatctcgcattacaaagctcgaccgttctgttttacccgctaatatgaagccaggcaaagataccttggaaacagttcttgaaacctataaaaaggataacaaagaagaacctgctactatcccaccagtatctttgaaggtttctggtttaactggtctgaaagaattagatttgtcaggttttgaccgtgaaaccttggctggtcttgatgccgctactctaacgtctttagaaaaagttgatatttctggcaacaaacttgatttggctccaggaacagaaaatcgacaaatttttgatactatgctatcaactatcagcaatcatgttggaagcaatgaacaaacagtgaaatttgacaagcaaaaaccaactgggcattacccagatacctatgggaaaactagtctgcgcttaccagtggcaaatgaaaaagttgatttgcaaagccagcttttgtttgggactgtgacaaatcaaggaaccctaatcaatagcgaagcagactataaggcttaccaaaatcataaaattgctggacgtagctttgttgattcaaactatcattacaataactttaaagtttcttatgagaactataccgttaaagtaactgattccacattgggaaccactactgacaaaacgctagcaactgataaagaagagacctataaggttgacttctttagcccagcagataagacaaaagctgttcatactgctaaagtgattgttggtgacgaaaaaaccatgatggttaatttggcagaaggcgcaacagttattggaggaagtgctgatcctgtaaatgcaagaaaggtatttgatgggcaactgggcagtgagactgataatatctctttaggatgggattctaagcaaagtattatatttaaattgaaagaagatggattaataaagcattggcgtttcttcaatgattcagcccgaaatcctgagacaaccaataaacctattcaggaagcaagtctacaaatttttaatatcaaagattataatctagataatttgttggaaaatcccaataaatttgatgatgaaaaatattggattactgtagatacttacagtgcacaaggagagagagctactgcattcagtaatacattaaataatattactagtaaatattggcgagttgtctttgatactaaaggagatagatatagttcgccagtagtccctgaactccaaattttaggttatccgttacctaacgccgacactatcatgaaaacagtaactactgctaaagagttatctcaacaaaaagataagttttctcaaaagatgcttgatgagttaaaaataaaagagatggctttagaaacttctttgaacagtaagatttttgatgtaactgctattaatgctaatgctggagttttgaaagattgtattgagaaaaggcagctgctaaaaaaataa

SEQ ID NO: 126 - protein, 1027 aa, Artificial Sequence
  SYNTHETIC FUSION PROTEN
MGSSHHHHHHSSGLVPRGSHMQEAKKEIPLKYGATNEGKRQDPAMQKFRDNRLGAFIHWGLYAIPGGEWNGKVYGGAAEWLKSWAKVPADEWLKLMDQWNPTKFDAKKWAKMAKEMGTKYVKITTKHHEGFCLWPSKYTKYTVANTPYKRDILGELVKAYNDEGIDVHFYFSVMDWSNPDYRYDIKSKEDSIAFSRFLEFTDNQLKELATRYPTVKDFWFDGTWDASVKKNGWWTAHAEQMLKELVPGVAINSRLRADDKGKRHFDSNGRLMGDYESGYERRLPDPVKDLKVTQWDWEACMTIPENQWGYHKDWSLSYVKTPIEVIDRIVHAVSMGGNMVVNFGPQADGDFRPEEKAMATAIGKWMNRYGKAVYACDYAGFEKQDWGYYTRGKNDEVYMVVFNQPYSERLIVKTPKGITVEKATLLTTGEDITVVETTRNEYNVSVPKKNPGEPYVIQLKVRAAKGTKSIYRDALTGSKDKSYDLIDEKDFPDKALREAVMAQVGTRKGDLERFNGTLRLDNPAIQSLEGLNKFKKLAQLDLIGLSRITKLDRSVLPANMKPGKDTLETVLETYKKDNKEEPATIPPVSLKVSGLTGLKELDLSGFDRETLAGLDAATLTSLEKVDISGNKLDLAPGTENRQIFDTMLSTISNHVGSNEQTVKFDKQKPTGHYPDTYGKTSLRLPVANEKVDLQSQLLFGTVTNQGTLINSEADYKAYQNHKIAGRSFVDSNYHYNNFKVSYENYTVKVTDSTLGTTTDKTLATDKEETYKVDFFSPADKTKAVHTAKVIVGDEKTMMVNLAEGATVIGGSADPVNARKVFDGQLGSETDNISLGWDSKQSIIFKLKEDGLIKHWRFFNDSARNPETTNKPIQEASLQIFNIKDYNLDNLLENPNKFDDEKYWITVDTYSAQGERATAFSNTLNNITSKYWRVVFDTKGDRYSSPVVPELQILGYPLPNADTIMKTVTTAKELSQQKDKFSQKMLDELKIKEMALETSLNSKIFDVTAINANAGVLKDCIEKRQLLK

SEQ ID NO: 127 - DNA, 2814 bp, Artificial Sequence
  SYNTHETIC FUSION PROTEN
atgggcagcagccatcatcatcatcatcacagcagcggcctggtgccgcgcggcagccatatgcaggaagcaaaaaaagaaattccgctgaaatatggcgccaccaatgaaggtaaacgtcaggaccctgccatgcagaaatttcgtgataatcgtctgggcgcatttattcattggggcctgtatgcaattccgggtggtgaatggaatggtaaagtgtatggtggtgcagcagaatggctgaaaagttgggcaaaagttccggccgatgaatggctgaagctgatggatcagtggaatccgaccaaatttgatgcaaaaaaatgggccaaaatggccaaagaaatgggcaccaaatatgtgaaaattaccaccaaacatcacgaaggcttttgcctgtggccgagtaaatataccaaatataccgtggccaataccccgtataaacgtgatattctgggcgaactggttaaagcctataatgatgaaggtattgatgttcatttctactttagcgtgatggattggagcaatccggattatcgttatgatattaaaagcaaagaggacagtatcgcctttagtcgctttctggaatttaccgataatcagctgaaagaactggccacccgttatccgaccgttaaagatttttggtttgatggtacctgggatgcaagcgtgaaaaaaaatggttggtggaccgcacatgcagaacagatgctgaaagaattagttccgggtgttgcaattaatagtcgcctgcgtgcagatgataaaggtaaacgtcattttgatagcaatggccgtctgatgggcgattatgaaagtggttatgaacgtcgtctgccggaccctgtgaaagatctgaaagtgacccagtgggattgggaagcatgcatgaccattccggaaaatcagtggggctatcataaagattggagtctgagttatgttaaaaccccgattgaagtgattgatcgtattgtgcatgccgttagcatgggtggtaatatggtggtgaattttggtccgcaggcagatggtgattttcgtccggaagaaaaagcaatggcaaccgcaattggtaaatggatgaatcgctatggtaaagcagtttatgcctgtgattatgccggttttgaaaaacaggattggggttattatacccgcggtaaaaatgatgaagtttatatggttgtgttcaaccagccgtatagcgaacgtctgattgttaaaacccctaaaggtattaccgtggaaaaagcaaccctgctgaccaccggcgaagatattaccgttgtggaaaccacccgtaatgaatataatgttagtgttccgaaaaagaacccgggcgaaccgtatgttattcagctgaaagttcgtgcagccaaaggcaccaaaagtatttatcgtgatgccctgacgggatccaccgaagacaaacgctatgatgtcattgatcaaaaagacattcctgacccagcattaagagaacaaatcattcaacaagttggacagtataaaggcgatttggaacgttataacaagacattggtgcttacaggagataagattcaaaatcttaaaggactagaaaaattaagcaagttacaaaaattagagttgcgccagctatctaacgttaaagaaattactccagaacttttgccggaaagcatgaaaaaagatgctgagcttgttatggtaggcatgactggtttagaaaaactaaaccttagtggtctaaatcgtcaaactttagacggtatagacgtgaatagtattacgcatttgacatcatttgatatttcacataatagtttggacttgtcggaaaagagtgaagaccgtaaactattaatgactttgatggagcaggtttcaaatcatcaaaaaataacggtgaaaaatacggcttttgaaaatcaaaaaccgaaaggttattatcctcagacgtatgataccaaagaaggtcattatgatgttgataatgcagaacatgatattttaactgattttgtttttggaactgttactaaacgtaatacctttattggagacgaagaagcatttgctatctataaagaaggagctgtcgatggtcgacaatatgtgtctaaagactatacttatgaagcttttcgtaaagactataaaggttacaaggttcatttaactgcttctaacctaggagaaacagttacttctaaggtaactgctactactgatgaaacttacttagtagatgtttctgatggggaaaaagttgttcaccacatgaaactcaatataggatctggtgccatcatgatggaaaatctggcaaaaggggctaaagtgattggtacatctggggactttgagcaagcaaagaagattttcgatggtgaaaagtcagatagattcttcacttggggacaaactaactggatagcttttgatctaggagaaattaatcttgcgaaggaatggcgtttatttaatgcagagacaaatactgaaataaagacagatagtagcttaaacgtggctaaaggacgtcttcagattttaaaagatacaactattgatttagaaaaaatggacataaaaaatcgtaaagagtatctgtcgaatgatgaaaattggactgatgttgctcagatggatgatgcaaaagcgatatttaatagtaaattatccaatgttttatctcggtattggcggttttgtgtagatggtggagctagctcttattaccctcaatataccgaacttcaaatcctcggacaacgtttatcaaatgatgtcgctaatacgctgaaggattaa

SEQ ID NO: 128 - protein, 937 aa, Artificial Sequence
  SYNTHETIC FUSION PROTEN
MGSSHHHHHHSSGLVPRGSHMQEAKKEIPLKYGATNEGKRQDPAMQKFRDNRLGAFIHWGLYAIPGGEWNGKVYGGAAEWLKSWAKVPADEWLKLMDQWNPTKFDAKKWAKMAKEMGTKYVKITTKHHEGFCLWPSKYTKYTVANTPYKRDILGELVKAYNDEGIDVHFYFSVMDWSNPDYRYDIKSKEDSIAFSRFLEFTDNQLKELATRYPTVKDFWFDGTWDASVKKNGWWTAHAEQMLKELVPGVAINSRLRADDKGKRHFDSNGRLMGDYESGYERRLPDPVKDLKVTQWDWEACMTIPENQWGYHKDWSLSYVKTPIEVIDRIVHAVSMGGNMVVNFGPQADGDFRPEEKAMATAIGKWMNRYGKAVYACDYAGFEKQDWGYYTRGKNDEVYMVVFNQPYSERLIVKTPKGITVEKATLLTTGEDITVVETTRNEYNVSVPKKNPGEPYVIQLKVRAAKGTKSIYRDALTGSTEDKRYDVIDQKDIPDPALREQIIQQVGQYKGDLERYNKTLVLTGDKIQNLKGLEKLSKLQKLELRQLSNVKEITPELLPESMKKDAELVMVGMTGLEKLNLSGLNRQTLDGIDVNSITHLTSFDISHNSLDLSEKSEDRKLLMTLMEQVSNHQKITVKNTAFENQKPKGYYPQTYDTKEGHYDVDNAEHDILTDFVFGTVTKRNTFIGDEEAFAIYKEGAVDGRQYVSKDYTYEAFRKDYKGYKVHLTASNLGETVTSKVTATTDETYLVDVSDGEKVVHHMKLNIGSGAIMMENLAKGAKVIGTSGDFEQAKKIFDGEKSDRFFTWGQTNWIAFDLGEINLAKEWRLFNAETNTEIKTDSSLNVAKGRLQILKDTTIDLEKMDIKNRKEYLSNDENWTDVAQMDDAKAIFNSKLSNVLSRYWRFCVDGGASSYYPQYTELQILGQRLSNDVANTLKD

SEQ ID NO: 129 - DNA, 4347 bp, Artificial Sequence
  SYNTHETIC FUSION PROTEN
atgggcagcagccatcatcatcatcatcacagcagcggcctggtgccgcgcggcagccatatgcaggaagcaaaaaaagaaattccgctgaaatatggcgccaccaatgaaggtaaacgtcaggaccctgccatgcagaaatttcgtgataatcgtctgggcgcatttattcattggggcctgtatgcaattccgggtggtgaatggaatggtaaagtgtatggtggtgcagcagaatggctgaaaagttgggcaaaagttccggccgatgaatggctgaagctgatggatcagtggaatccgaccaaatttgatgcaaaaaaatgggccaaaatggccaaagaaatgggcaccaaatatgtgaaaattaccaccaaacatcacgaaggcttttgcctgtggccgagtaaatataccaaatataccgtggccaataccccgtataaacgtgatattctgggcgaactggttaaagcctataatgatgaaggtattgatgttcatttctactttagcgtgatggattggagcaatccggattatcgttatgatattaaaagcaaagaggacagtatcgcctttagtcgctttctggaatttaccgataatcagctgaaagaactggccacccgttatccgaccgttaaagatttttggtttgatggtacctgggatgcaagcgtgaaaaaaaatggttggtggaccgcacatgcagaacagatgctgaaagaattagttccgggtgttgcaattaatagtcgcctgcgtgcagatgataaaggtaaacgtcattttgatagcaatggccgtctgatgggcgattatgaaagtggttatgaacgtcgtctgccggaccctgtgaaagatctgaaagtgacccagtgggattgggaagcatgcatgaccattccggaaaatcagtggggctatcataaagattggagtctgagttatgttaaaaccccgattgaagtgattgatcgtattgtgcatgccgttagcatgggtggtaatatggtggtgaattttggtccgcaggcagatggtgattttcgtccggaagaaaaagcaatggcaaccgcaattggtaaatggatgaatcgctatggtaaagcagtttatgcctgtgattatgccggttttgaaaaacaggattggggttattatacccgcggtaaaaatgatgaagtttatatggttgtgttcaaccagccgtatagcgaacgtctgattgttaaaacccctaaaggtattaccgtggaaaaagcaaccctgctgaccaccggcgaagatattaccgttgtggaaaccacccgtaatgaatataatgttagtgttccgaaaaagaacccgggcgaaccgtatgttattcagctgaaagttcgtgcagccaaaggcaccaaaagtatttatcgtgatgccctgacgggatccacccaccatgattcactcaatactgtaaaagcggaggagaagactgttcaggttcagaaaggattaccttctatcgatagcttgcattatctgtcagagaatagcaaaaaagaatttaaagaagaactctcaaaagcggggcaagaatctcaaaaggtcaaagagatattagcaaaagctcagcaggcagataaacaagctcaagaacttgccaaaatgaaaattcctgagaaaataccgatgaaaccgttacatggttctctctacggtggttactttagaacttggcatgacaaaacatcagatccaacagaaaaagacaaagttaactcgatgggagagcttcctaaagaagtagatctagcctttattttccacgattggacaaaagattatagccttttttggaaagaattggccaccaaacatgtgccaaagttaaacaagcaagggacacgtgtcattcgtaccattccatggcgtttcctagctgggggtgataacagtggtattgcagaagataccagtaaatacccaaatacaccagagggaaataaagctttagccaaagctattgttgatgaatatgtttataaatacaaccttgatggcttagatgtggatgttgaacatgatagtattccaaaagttgacaaaaaagaagatacagcaggcgtagaacgctctattcaagtgtttgaagaaattgggaaattaattggaccaaaaggtgttgataaatcgcggttatttattatggatagcacctacatggctgataaaaacccattgattgagcgaggagctccttatattaatttattactggtacaggtctatggttcacaaggagagaaaggtggttgggagcctgtttctaatcgacctgaaaaaacaatggaagaacgatggcaaggttatagcaagtatattcgtcctgaacaatacatgattggtttttctttctatgaggaaaatgctcaagaagggaatctttggtatgatattaattctcgcaaggacgaggacaaagcaaatggaattaacactgacataactggaacgcgtgccgaacggtatgcaaggtggcaacctaagacaggtggggttaagggaggtatcttctcctacgctattgaccgagatggtgtagctcatcaacctaaaaaatatgctaaacagaaagagtttaaggacgcaactgataacatcttccactcagattatagtgtctccaaggcattaaagacagttatgctaaaagataagtcgtatgatctgattgatgagaaagatttcccagataaggctttgcgagaagctgtgatggcgcaggttggaaccagaaaaggtgatttggaacgtttcaatggcacattacgattggataatccagcgattcaaagtttagaaggtctaaataaatttaaaaaattagctcaattagacttgattggcttatctcgcattacaaagctcgaccgttctgttttacccgctaatatgaagccaggcaaagataccttggaaacagttcttgaaacctataaaaaggataacaaagaagaacctgctactatcccaccagtatctttgaaggtttctggtttaactggtctgaaagaattagatttgtcaggttttgaccgtgaaaccttggctggtcttgatgccgctactctaacgtctttagaaaaagttgatatttctggcaacaaacttgatttggctccaggaacagaaaatcgacaaatttttgatactatgctatcaactatcagcaatcatgttggaagcaatgaacaaacagtgaaatttgacaagcaaaaaccaactgggcattacccagatacctatgggaaaactagtctgcgcttaccagtggcaaatgaaaaagttgatttgcaaagccagcttttgtttgggactgtgacaaatcaaggaaccctaatcaatagcgaagcagactataaggcttaccaaaatcataaaattgctggacgtagctttgttgattcaaactatcattacaataactttaaagtttcttatgagaactataccgttaaagtaactgattccacattgggaaccactactgacaaaacgctagcaactgataaagaagagacctataaggttgacttctttagcccagcagataagacaaaagctgttcatactgctaaagtgattgttggtgacgaaaaaaccatgatggttaatttggcagaaggcgcaacagttattggaggaagtgctgatcctgtaaatgcaagaaaggtatttgatgggcaactgggcagtgagactgataatatctctttaggatgggattctaagcaaagtattatatttaaattgaaagaagatggattaataaagcattggcgtttcttcaatgattcagcccgaaatcctgagacaaccaataaacctattcaggaagcaagtctacaaatttttaatatcaaagattataatctagataatttgttggaaaatcccaataaatttgatgatgaaaaatattggattactgtagatacttacagtgcacaaggagagagagctactgcattcagtaatacattaaataatattactagtaaatattggcgagttgtctttgatactaaaggagatagatatagttcgccagtagtccctgaactccaaattttaggttatccgttacctaacgccgacactatcatgaaaacagtaactactgctaaagagttatctcaacaaaaagataagttttctcaaaagatgcttgatgagttaaaaataaaagagatggctttagaaacttctttgaacagtaagatttttgatgtaactgctattaatgctaatgctggagttttgaaagattgtattgagaaaaggcagctgctaaaaaaataa

SEQ ID NO: 130 - protein, 1447 aa, Artificial Sequence
  SYNTHETIC FUSION PROTEN
MGSSHHHHHHSSGLVPRGSHMQEAKKEIPLKYGATNEGKRQDPAMQKFRDNRLGAFIHWGLYAIPGGEWNGKVYGGAAEWLKSWAKVPADEWLKLMDQWNPTKFDAKKWAKMAKEMGTKYVKITTKHHEGFCLWPSKYTKYTVANTPYKRDILGELVKAYNDEGIDVHFYFSVMDWSNPDYRYDIKSKEDSIAFSRFLEFTDNQLKELATRYPTVKDFWFDGTWDASVKKNGWWTAHAEQMLKELVPGVAINSRLRADDKGKRHFDSNGRLMGDYESGYERRLPDPVKDLKVTQWDWEACMTIPENQWGYHKDWSLSYVKTPIEVIDRIVHAVSMGGNMVVNFGPQADGDFRPEEKAMATAIGKWMNRYGKAVYACDYAGFEKQDWGYYTRGKNDEVYMVVFNQPYSERLIVKTPKGITVEKATLLTTGEDITVVETTRNEYNVSVPKKNPGEPYVIQLKVRAAKGTKSIYRDALTGSTHHDSLNTVKAEEKTVQVQKGLPSIDSLHYLSENSKKEFKEELSKAGQESQKVKEILAKAQQADKQAQELAKMKIPEKIPMKPLHGSLYGGYFRTWHDKTSDPTEKDKVNSMGELPKEVDLAFIFHDWTKDYSLFWKELATKHVPKLNKQGTRVIRTIPWRFLAGGDNSGIAEDTSKYPNTPEGNKALAKAIVDEYVYKYNLDGLDVDVEHDSIPKVDKKEDTAGVERSIQVFEEIGKLIGPKGVDKSRLFIMDSTYMADKNPLIERGAPYINLLLVQVYGSQGEKGGWEPVSNRPEKTMEERWQGYSKYIRPEQYMIGFSFYEENAQEGNLWYDINSRKDEDKANGINTDITGTRAERYARWQPKTGGVKGGIFSYAIDRDGVAHQPKKYAKQKEFKDATDNIFHSDYSVSKALKTVMLKDKSYDLIDEKDFPDKALREAVMAQVGTRKGDLERFNGTLRLDNPAIQSLEGLNKFKKLAQLDLIGLSRITKLDRSVLPANMKPGKDTLETVLETYKKDNKEEPATIPPVSLKVSGLTGLKELDLSGFDRETLAGLDAATLTSLEKVDISGNKLDLAPGTENRQIFDTMLSTISNHVGSNEQTVKFDKQKPTGHYPDTYGKTSLRLPVANEKVDLQSQLLFGTVTNQGTLINSEADYKAYQNHKIAGRSFVDSNYHYNNFKVSYENYTVKVTDSTLGTTTDKTLATDKEETYKVDFFSPADKTKAVHTAKVIVGDEKTMMVNLAEGATVIGGSADPVNARKVFDGQLGSETDNISLGWDSKQSIIFKLKEDGLIKHWRFFNDSARNPETTNKPIQEASLQIFNIKDYNLDNLLENPNKFDDEKYWITVDTYSAQGERATAFSNTLNNITSKYWRVVFDTKGDRYSSPVVPELQILGYPLPNADTIMKTVTTAKELSQQKDKFSQKMLDELKIKEMALETSLNSKIFDVTAINANAGVLKDCIEKRQLLK

SEQ ID NO: 131 - DNA, 4347 bp, Artificial Sequence
  SYNTHETIC FUSION PROTEN
atgggcagcagccatcatcatcatcatcacagcagcggcctggtgccgcgcggcagccatatgcaggaagcaaaaaaagaaattccgctgaaatatggcgccaccaatgaaggtaaacgtcaggaccctgccatgcagaaatttcgtgataatcgtctgggcgcatttattcattggggcctgtatgcaattccgggtggtgaatggaatggtaaagtgtatggtggtgcagcagaatggctgaaaagttgggcaaaagttccggccgatgaatggctgaagctgatggatcagtggaatccgaccaaatttgatgcaaaaaaatgggccaaaatggccaaagaaatgggcaccaaatatgtgaaaattaccaccaaacatcacgaaggcttttgcctgtggccgagtaaatataccaaatataccgtggccaataccccgtataaacgtgatattctgggcgaactggttaaagcctataatgatgaaggtattgatgttcatttctactttagcgtgatggattggagcaatccggattatcgttatgatattaaaagcaaagaggacagtatcgcctttagtcgctttctggaatttaccgataatcagctgaaagaactggccacccgttatccgaccgttaaagatttttggtttgatggtacctgggatgcaagcgtgaaaaaaaatggttggtggaccgcacatgcagaacagatgctgaaagaattagttccgggtgttgcaattaatagtcgcctgcgtgcagatgataaaggtaaacgtcattttgatagcaatggccgtctgatgggcgattatgaaagtggttatgaacgtcgtctgccggaccctgtgaaagatctgaaagtgacccagtgggattgggaagcatgcatgaccattccggaaaatcagtggggctatcataaagattggagtctgagttatgttaaaaccccgattgaagtgattgatcgtattgtgcatgccgttagcatgggtggtaatatggtggtgaattttggtccgcaggcagatggtgattttcgtccggaagaaaaagcaatggcaaccgcaattggtaaatggatgaatcgctatggtaaagcagtttatgcctgtgattatgccggttttgaaaaacaggattggggttattatacccgcggtaaaaatgatgaagtttatatggttgtgttcaaccagccgtatagcgaacgtctgattgttaaaacccctaaaggtattaccgtggaaaaagcaaccctgctgaccaccggcgaagatattaccgttgtggaaaccacccgtaatgaatataatgttagtgttccgaaaaagaacccgggcgaaccgtatgttattcagctgaaagttcgtgcagccaaaggcaccaaaagtatttatcgtgatgccctgacgggatccacccaccatgattcactcaatactgtaaaagcggaggagaagactgttcaggttcagaaaggattaccttctatcgatagcttgcattatctgtcagagaatagcaaaaaagaatttaaagaagaactctcaaaagcggggcaagaatctcaaaaggtcaaagagatattagcaaaagctcagcaggcagataaacaagctcaagaacttgccaaaatgaaaattcctgagaaaataccgatgaaaccgttacatggttctctctacggtggttactttagaacttggcatgacaaaacatcagatccaacagaaaaagacaaagttaactcgatgggagagcttcctaaagaagtagatctagcctttattttccacgattggacaaaagattatagccttttttggaaagaattggccaccaaacatgtgccaaagttaaacaagcaagggacacgtgtcattcgtaccattccatggcgtttcctagctgggggtgataacagtggtattgcagaagataccagtaaatacccaaatacaccagagggaaataaagctttagccaaagctattgttgatgaatatgtttataaatacaaccttgatggcttagatgtgcaggttgaacatgatagtattccaaaagttgacaaaaaagaagatacagcaggcgtagaacgctctattcaagtgtttgaagaaattgggaaattaattggaccaaaaggtgttgataaatcgcggttatttattatggatagcacctacatggctgataaaaacccattgattgagcgaggagctccttatattaatttattactggtacaggtctatggttcacaaggagagaaaggtggttgggagcctgtttctaatcgacctgaaaaaacaatggaagaacgatggcaaggttatagcaagtatattcgtcctgaacaatacatgattggtttttctttctatgaggaaaatgctcaagaagggaatctttggtatgatattaattctcgcaaggacgaggacaaagcaaatggaattaacactgacataactggaacgcgtgccgaacggtatgcaaggtggcaacctaagacaggtggggttaagggaggtatcttctcctacgctattgaccgagatggtgtagctcatcaacctaaaaaatatgctaaacagaaagagtttaaggacgcaactgataacatcttccactcagattatagtgtctccaaggcattaaagacagttatgctaaaagataagtcgtatgatctgattgatgagaaagatttcccagataaggctttgcgagaagctgtgatggcgcaggttggaaccagaaaaggtgatttggaacgtttcaatggcacattacgattggataatccagcgattcaaagtttagaaggtctaaataaatttaaaaaattagctcaattagacttgattggcttatctcgcattacaaagctcgaccgttctgttttacccgctaatatgaagccaggcaaagataccttggaaacagttcttgaaacctataaaaaggataacaaagaagaacctgctactatcccaccagtatctttgaaggtttctggtttaactggtctgaaagaattagatttgtcaggttttgaccgtgaaaccttggctggtcttgatgccgctactctaacgtctttagaaaaagttgatatttctggcaacaaacttgatttggctccaggaacagaaaatcgacaaatttttgatactatgctatcaactatcagcaatcatgttggaagcaatgaacaaacagtgaaatttgacaagcaaaaaccaactgggcattacccagatacctatgggaaaactagtctgcgcttaccagtggcaaatgaaaaagttgatttgcaaagccagcttttgtttgggactgtgacaaatcaaggaaccctaatcaatagcgaagcagactataaggcttaccaaaatcataaaattgctggacgtagctttgttgattcaaactatcattacaataactttaaagtttcttatgagaactataccgttaaagtaactgattccacattgggaaccactactgacaaaacgctagcaactgataaagaagagacctataaggttgacttctttagcccagcagataagacaaaagctgttcatactgctaaagtgattgttggtgacgaaaaaaccatgatggttaatttggcagaaggcgcaacagttattggaggaagtgctgatcctgtaaatgcaagaaaggtatttgatgggcaactgggcagtgagactgataatatctctttaggatgggattctaagcaaagtattatatttaaattgaaagaagatggattaataaagcattggcgtttcttcaatgattcagcccgaaatcctgagacaaccaataaacctattcaggaagcaagtctacaaatttttaatatcaaagattataatctagataatttgttggaaaatcccaataaatttgatgatgaaaaatattggattactgtagatacttacagtgcacaaggagagagagctactgcattcagtaatacattaaataatattactagtaaatattggcgagttgtctttgatactaaaggagatagatatagttcgccagtagtccctgaactccaaattttaggttatccgttacctaacgccgacactatcatgaaaacagtaactactgctaaagagttatctcaacaaaaagataagttttctcaaaagatgcttgatgagttaaaaataaaagagatggctttagaaacttctttgaacagtaagatttttgatgtaactgctattaatgctaatgctggagttttgaaagattgtattgagaaaaggcagctgctaaaaaaataa

SEQ ID NO: 132 - protein, 1447 aa, Artificial Sequence
  SYNTHETIC FUSION PROTEN
MGSSHHHHHHSSGLVPRGSHMQEAKKEIPLKYGATNEGKRQDPAMQKFRDNRLGAFIHWGLYAIPGGEWNGKVYGGAAEWLKSWAKVPADEWLKLMDQWNPTKFDAKKWAKMAKEMGTKYVKITTKHHEGFCLWPSKYTKYTVANTPYKRDILGELVKAYNDEGIDVHFYFSVMDWSNPDYRYDIKSKEDSIAFSRFLEFTDNQLKELATRYPTVKDFWFDGTWDASVKKNGWWTAHAEQMLKELVPGVAINSRLRADDKGKRHFDSNGRLMGDYESGYERRLPDPVKDLKVTQWDWEACMTIPENQWGYHKDWSLSYVKTPIEVIDRIVHAVSMGGNMVVNFGPQADGDFRPEEKAMATAIGKWMNRYGKAVYACDYAGFEKQDWGYYTRGKNDEVYMVVFNQPYSERLIVKTPKGITVEKATLLTTGEDITVVETTRNEYNVSVPKKNPGEPYVIQLKVRAAKGTKSIYRDALTGSTHHDSLNTVKAEEKTVQVQKGLPSIDSLHYLSENSKKEFKEELSKAGQESQKVKEILAKAQQADKQAQELAKMKIPEKIPMKPLHGSLYGGYFRTWHDKTSDPTEKDKVNSMGELPKEVDLAFIFHDWTKDYSLFWKELATKHVPKLNKQGTRVIRTIPWRFLAGGDNSGIAEDTSKYPNTPEGNKALAKAIVDEYVYKYNLDGLDVQVEHDSIPKVDKKEDTAGVERSIQVFEEIGKLIGPKGVDKSRLFIMDSTYMADKNPLIERGAPYINLLLVQVYGSQGEKGGWEPVSNRPEKTMEERWQGYSKYIRPEQYMIGFSFYEENAQEGNLWYDINSRKDEDKANGINTDITGTRAERYARWQPKTGGVKGGIFSYAIDRDGVAHQPKKYAKQKEFKDATDNIFHSDYSVSKALKTVMLKDKSYDLIDEKDFPDKALREAVMAQVGTRKGDLERFNGTLRLDNPAIQSLEGLNKFKKLAQLDLIGLSRITKLDRSVLPANMKPGKDTLETVLETYKKDNKEEPATIPPVSLKVSGLTGLKELDLSGFDRETLAGLDAATLTSLEKVDISGNKLDLAPGTENRQIFDTMLSTISNHVGSNEQTVKFDKQKPTGHYPDTYGKTSLRLPVANEKVDLQSQLLFGTVTNQGTLINSEADYKAYQNHKIAGRSFVDSNYHYNNFKVSYENYTVKVTDSTLGTTTDKTLATDKEETYKVDFFSPADKTKAVHTAKVIVGDEKTMMVNLAEGATVIGGSADPVNARKVFDGQLGSETDNISLGWDSKQSIIFKLKEDGLIKHWRFFNDSARNPETTNKPIQEASLQIFNIKDYNLDNLLENPNKFDDEKYWITVDTYSAQGERATAFSNTLNNITSKYWRVVFDTKGDRYSSPVVPELQILGYPLPNADTIMKTVTTAKELSQQKDKFSQKMLDELKIKEMALETSLNSKIFDVTAINANAGVLKDCIEKRQLLK

SEQ ID NO: 133 - DNA, 3858 bp, Artificial Sequence
  SYNTHETIC FUSION PROTEN
atgggcagcagccatcatcatcatcatcacagcagcggcctggtgccgcgcggcagccatatgcaggaagcaaaaaaagaaattccgctgaaatatggcgccaccaatgaaggtaaacgtcaggaccctgccatgcagaaatttcgtgataatcgtctgggcgcatttattcattggggcctgtatgcaattccgggtggtgaatggaatggtaaagtgtatggtggtgcagcagaatggctgaaaagttgggcaaaagttccggccgatgaatggctgaagctgatggatcagtggaatccgaccaaatttgatgcaaaaaaatgggccaaaatggccaaagaaatgggcaccaaatatgtgaaaattaccaccaaacatcacgaaggcttttgcctgtggccgagtaaatataccaaatataccgtggccaataccccgtataaacgtgatattctgggcgaactggttaaagcctataatgatgaaggtattgatgttcatttctactttagcgtgatggattggagcaatccggattatcgttatgatattaaaagcaaagaggacagtatcgcctttagtcgctttctggaatttaccgataatcagctgaaagaactggccacccgttatccgaccgttaaagatttttggtttgatggtacctgggatgcaagcgtgaaaaaaaatggttggtggaccgcacatgcagaacagatgctgaaagaattagttccgggtgttgcaattaatagtcgcctgcgtgcagatgataaaggtaaacgtcattttgatagcaatggccgtctgatgggcgattatgaaagtggttatgaacgtcgtctgccggaccctgtgaaagatctgaaagtgacccagtgggattgggaagcatgcatgaccattccggaaaatcagtggggctatcataaagattggagtctgagttatgttaaaaccccgattgaagtgattgatcgtattgtgcatgccgttagcatgggtggtaatatggtggtgaattttggtccgcaggcagatggtgattttcgtccggaagaaaaagcaatggcaaccgcaattggtaaatggatgaatcgctatggtaaagcagtttatgcctgtgattatgccggttttgaaaaacaggattggggttattatacccgcggtaaaaatgatgaagtttatatggttgtgttcaaccagccgtatagcgaacgtctgattgttaaaacccctaaaggtattaccgtggaaaaagcaaccctgctgaccaccggcgaagatattaccgttgtggaaaccacccgtaatgaatataatgttagtgttccgaaaaagaacccgggcgaaccgtatgttattcagctgaaagttcgtgcagccaaaggcaccaaaagtatttatcgtgatgccctgacgggatccgaggagaagactgttcaaacaggaaagacagatcagcaggttggtgctaaattggtacaggaaatccgtgaaggaaaacgcggaccactatatgctggttattttaggacatggcatgatcgtgcttcaacaggaatagatggtaaacagcaacatccagaaaatactatggctgaggtcccaaaagaagttgatatcttatttgtttttcatgaccatacagcttcagatagtccattttggtctgaattaaaggacagttatgtccataaattacatcaacagggaacggcacttgttcagacaattggtgttaacgaattaaatggacgtacaggtttatctaaagattatcctgatactcctgaggggaacaaagctttagcagcagccattgtcaaggcatttgtaactgatcgtggtgtcgatggactagatattgatattgagcacgaatttacgaacaaaagaacacctgaagaagatgctcgtgctctaaatgtttttaaagagattgcgcagttaataggtaaaaatggtagtgataaatctaaattgctcatcatggacactaccctaagtgttgaaaataatccaatatttaaagggatagcggaagatcttgattatcttcttagacaatattatggttcacaaggtggagaagctgaagtggatactataaactctgattggaaccaatatcagaattatattgatgctagccagttcatgattggattctccttttttgaagaatctgcgtccaaagggaatttatggtttgatgttaacgaatacgaccctaacaatcctgaaaaagggaaagatattgaaggaacacgtgctaaaaaatatgcagagtggcaacctagtacaggtggtttaaaagcaggtatattctcttatgctattgatcgtgatggagtggctcatgttccttcaacatataaaaataggactagtacaaatttacaacggcatgaagtcgataatatctcacatactgactacaccgtatctcgaaaattaaaaacattgatgaccgaagacaaacgctatgatgtcattgatcaaaaagacattcctgacccagcattaagagaacaaatcattcaacaagttggacagtataaaggcgatttggaacgttataacaagacattggtgcttacaggagataagattcaaaatcttaaaggactagaaaaattaagcaagttacaaaaattagagttgcgccagctatctaacgttaaagaaattactccagaacttttgccggaaagcatgaaaaaagatgctgagcttgttatggtaggcatgactggtttagaaaaactaaaccttagtggtctaaatcgtcaaactttagacggtatagacgtgaatagtattacgcatttgacatcatttgatatttcacataatagtttggacttgtcggaaaagagtgaagaccgtaaactattaatgactttgatggagcaggtttcaaatcatcaaaaaataacggtgaaaaatacggcttttgaaaatcaaaaaccgaaaggttattatcctcagacgtatgataccaaagaaggtcattatgatgttgataatgcagaacatgatattttaactgattttgtttttggaactgttactaaacgtaatacctttattggagacgaagaagcatttgctatctataaagaaggagctgtcgatggtcgacaatatgtgtctaaagactatacttatgaagcttttcgtaaagactataaaggttacaaggttcatttaactgcttctaacctaggagaaacagttacttctaaggtaactgctactactgatgaaacttacttagtagatgtttctgatggggaaaaagttgttcaccacatgaaactcaatataggatctggtgccatcatgatggaaaatctggcaaaaggggctaaagtgattggtacatctggggactttgagcaagcaaagaagattttcgatggtgaaaagtcagatagattcttcacttggggacaaactaactggatagcttttgatctaggagaaattaatcttgcgaaggaatggcgtttatttaatgcagagacaaatactgaaataaagacagatagtagcttaaacgtggctaaaggacgtcttcagattttaaaagatacaactattgatttagaaaaaatggacataaaaaatcgtaaagagtatctgtcgaatgatgaaaattggactgatgttgctcagatggatgatgcaaaagcgatatttaatagtaaattatccaatgttttatctcggtattggcggttttgtgtagatggtggagctagctcttattaccctcaatataccgaacttcaaatcctcggacaacgtttatcaaatgatgtcgctaatacgctgaaggattaa

SEQ ID NO: 134 - protein, 1285 aa, Artificial Sequence
  SYNTHETIC FUSION PROTEN
MGSSHHHHHHSSGLVPRGSHMQEAKKEIPLKYGATNEGKRQDPAMQKFRDNRLGAFIHWGLYAIPGGEWNGKVYGGAAEWLKSWAKVPADEWLKLMDQWNPTKFDAKKWAKMAKEMGTKYVKITTKHHEGFCLWPSKYTKYTVANTPYKRDILGELVKAYNDEGIDVHFYFSVMDWSNPDYRYDIKSKEDSIAFSRFLEFTDNQLKELATRYPTVKDFWFDGTWDASVKKNGWWTAHAEQMLKELVPGVAINSRLRADDKGKRHFDSNGRLMGDYESGYERRLPDPVKDLKVTQWDWEACMTIPENQWGYHKDWSLSYVKTPIEVIDRIVHAVSMGGNMVVNFGPQADGDFRPEEKAMATAIGKWMNRYGKAVYACDYAGFEKQDWGYYTRGKNDEVYMVVFNQPYSERLIVKTPKGITVEKATLLTTGEDITVVETTRNEYNVSVPKKNPGEPYVIQLKVRAAKGTKSIYRDALTGSEEKTVQTGKTDQQVGAKLVQEIREGKRGPLYAGYFRTWHDRASTGIDGKQQHPENTMAEVPKEVDILFVFHDHTASDSPFWSELKDSYVHKLHQQGTALVQTIGVNELNGRTGLSKDYPDTPEGNKALAAAIVKAFVTDRGVDGLDIDIEHEFTNKRTPEEDARALNVFKEIAQLIGKNGSDKSKLLIMDTTLSVENNPIFKGIAEDLDYLLRQYYGSQGGEAEVDTINSDWNQYQNYIDASQFMIGFSFFEESASKGNLWFDVNEYDPNNPEKGKDIEGTRAKKYAEWQPSTGGLKAGIFSYAIDRDGVAHVPSTYKNRTSTNLQRHEVDNISHTDYTVSRKLKTLMTEDKRYDVIDQKDIPDPALREQIIQQVGQYKGDLERYNKTLVLTGDKIQNLKGLEKLSKLQKLELRQLSNVKEITPELLPESMKKDAELVMVGMTGLEKLNLSGLNRQTLDGIDVNSITHLTSFDISHNSLDLSEKSEDRKLLMTLMEQVSNHQKITVKNTAFENQKPKGYYPQTYDTKEGHYDVDNAEHDILTDFVFGTVTKRNTFIGDEEAFAIYKEGAVDGRQYVSKDYTYEAFRKDYKGYKVHLTASNLGETVTSKVTATTDETYLVDVSDGEKVVHHMKLNIGSGAIMMENLAKGAKVIGTSGDFEQAKKIFDGEKSDRFFTWGQTNWIAFDLGEINLAKEWRLFNAETNTEIKTDSSLNVAKGRLQILKDTTIDLEKMDIKNRKEYLSNDENWTDVAQMDDAKAIFNSKLSNVLSRYWRFCVDGGASSYYPQYTELQILGQRLSNDVANTLKD

SEQ ID NO: 135 - DNA, 3858 bp, Artificial Sequence
  SYNTHETIC FUSION PROTEN
atgggcagcagccatcatcatcatcatcacagcagcggcctggtgccgcgcggcagccatatgcaggaagcaaaaaaagaaattccgctgaaatatggcgccaccaatgaaggtaaacgtcaggaccctgccatgcagaaatttcgtgataatcgtctgggcgcatttattcattggggcctgtatgcaattccgggtggtgaatggaatggtaaagtgtatggtggtgcagcagaatggctgaaaagttgggcaaaagttccggccgatgaatggctgaagctgatggatcagtggaatccgaccaaatttgatgcaaaaaaatgggccaaaatggccaaagaaatgggcaccaaatatgtgaaaattaccaccaaacatcacgaaggcttttgcctgtggccgagtaaatataccaaatataccgtggccaataccccgtataaacgtgatattctgggcgaactggttaaagcctataatgatgaaggtattgatgttcatttctactttagcgtgatggattggagcaatccggattatcgttatgatattaaaagcaaagaggacagtatcgcctttagtcgctttctggaatttaccgataatcagctgaaagaactggccacccgttatccgaccgttaaagatttttggtttgatggtacctgggatgcaagcgtgaaaaaaaatggttggtggaccgcacatgcagaacagatgctgaaagaattagttccgggtgttgcaattaatagtcgcctgcgtgcagatgataaaggtaaacgtcattttgatagcaatggccgtctgatgggcgattatgaaagtggttatgaacgtcgtctgccggaccctgtgaaagatctgaaagtgacccagtgggattgggaagcatgcatgaccattccggaaaatcagtggggctatcataaagattggagtctgagttatgttaaaaccccgattgaagtgattgatcgtattgtgcatgccgttagcatgggtggtaatatggtggtgaattttggtccgcaggcagatggtgattttcgtccggaagaaaaagcaatggcaaccgcaattggtaaatggatgaatcgctatggtaaagcagtttatgcctgtgattatgccggttttgaaaaacaggattggggttattatacccgcggtaaaaatgatgaagtttatatggttgtgttcaaccagccgtatagcgaacgtctgattgttaaaacccctaaaggtattaccgtggaaaaagcaaccctgctgaccaccggcgaagatattaccgttgtggaaaccacccgtaatgaatataatgttagtgttccgaaaaagaacccgggcgaaccgtatgttattcagctgaaagttcgtgcagccaaaggcaccaaaagtatttatcgtgatgccctgacgggatccgaggagaagactgttcaaacaggaaagacagatcagcaggttggtgctaaattggtacaggaaatccgtgaaggaaaacgcggaccactatatgctggttattttaggacatggcatgatcgtgcttcaacaggaatagatggtaaacagcaacatccagaaaatactatggctgaggtcccaaaagaagttgatatcttatttgtttttcatgaccatacagcttcagatagtccattttggtctgaattaaaggacagttatgtccataaattacatcaacagggaacggcacttgttcaggaaattggtgttaacgaattaaatggacgtacaggtttatctaaagattatcctgatactcctgaggggaacaaagctttagcagcagccattgtcaaggcatttgtaactgatcgtggtgtcgatggactagatattgatattgagcacgaatttacgaacaaaagaacacctgaagaagatgctcgtgctctaaatgtttttaaagagattgcgcagttaataggtaaaaatggtagtgataaatctaaattgctcatcatggacactaccctaagtgttgaaaataatccaatatttaaagggatagcggaagatcttgattatcttcttagacaatattatggttcacaaggtggagaagctgaagtggatactataaactctgattggaaccaatatcagaattatattgatgctagccagttcatgattggattctccttttttgaagaatctgcgtccaaagggaatttatggtttgatgttaacgaatacgaccctaacaatcctgaaaaagggaaagatattgaaggaacacgtgctaaaaaatatgcagagtggcaacctagtacaggtggtttaaaagcaggtatattctcttatgctattgatcgtgatggagtggctcatgttccttcaacatataaaaataggactagtacaaatttacaacggcatgaagtcgataatatctcacatactgactacaccgtatctcgaaaattaaaaacattgatgaccgaagacaaacgctatgatgtcattgatcaaaaagacattcctgacccagcattaagagaacaaatcattcaacaagttggacagtataaaggcgatttggaacgttataacaagacattggtgcttacaggagataagattcaaaatcttaaaggactagaaaaattaagcaagttacaaaaattagagttgcgccagctatctaacgttaaagaaattactccagaacttttgccggaaagcatgaaaaaagatgctgagcttgttatggtaggcatgactggtttagaaaaactaaaccttagtggtctaaatcgtcaaactttagacggtatagacgtgaatagtattacgcatttgacatcatttgatatttcacataatagtttggacttgtcggaaaagagtgaagaccgtaaactattaatgactttgatggagcaggtttcaaatcatcaaaaaataacggtgaaaaatacggcttttgaaaatcaaaaaccgaaaggttattatcctcagacgtatgataccaaagaaggtcattatgatgttgataatgcagaacatgatattttaactgattttgtttttggaactgttactaaacgtaatacctttattggagacgaagaagcatttgctatctataaagaaggagctgtcgatggtcgacaatatgtgtctaaagactatacttatgaagcttttcgtaaagactataaaggttacaaggttcatttaactgcttctaacctaggagaaacagttacttctaaggtaactgctactactgatgaaacttacttagtagatgtttctgatggggaaaaagttgttcaccacatgaaactcaatataggatctggtgccatcatgatggaaaatctggcaaaaggggctaaagtgattggtacatctggggactttgagcaagcaaagaagattttcgatggtgaaaagtcagatagattcttcacttggggacaaactaactggatagcttttgatctaggagaaattaatcttgcgaaggaatggcgtttatttaatgcagagacaaatactgaaataaagacagatagtagcttaaacgtggctaaaggacgtcttcagattttaaaagatacaactattgatttagaaaaaatggacataaaaaatcgtaaagagtatctgtcgaatgatgaaaattggactgatgttgctcagatggatgatgcaaaagcgatatttaatagtaaattatccaatgttttatctcggtattggcggttttgtgtagatggtggagctagctcttattaccctcaatataccgaacttcaaatcctcggacaacgtttatcaaatgatgtcgctaatacgctgaaggattaa

SEQ ID NO: 136 - protein, 1285 aa, Artificial Sequence
  SYNTHETIC FUSION PROTEN
MGSSHHHHHHSSGLVPRGSHMQEAKKEIPLKYGATNEGKRQDPAMQKFRDNRLGAFIHWGLYAIPGGEWNGKVYGGAAEWLKSWAKVPADEWLKLMDQWNPTKFDAKKWAKMAKEMGTKYVKITTKHHEGFCLWPSKYTKYTVANTPYKRDILGELVKAYNDEGIDVHFYFSVMDWSNPDYRYDIKSKEDSIAFSRFLEFTDNQLKELATRYPTVKDFWFDGTWDASVKKNGWWTAHAEQMLKELVPGVAINSRLRADDKGKRHFDSNGRLMGDYESGYERRLPDPVKDLKVTQWDWEACMTIPENQWGYHKDWSLSYVKTPIEVIDRIVHAVSMGGNMVVNFGPQADGDFRPEEKAMATAIGKWMNRYGKAVYACDYAGFEKQDWGYYTRGKNDEVYMVVFNQPYSERLIVKTPKGITVEKATLLTTGEDITVVETTRNEYNVSVPKKNPGEPYVIQLKVRAAKGTKSIYRDALTGSEEKTVQTGKTDQQVGAKLVQEIREGKRGPLYAGYFRTWHDRASTGIDGKQQHPENTMAEVPKEVDILFVFHDHTASDSPFWSELKDSYVHKLHQQGTALVQEIGVNELNGRTGLSKDYPDTPEGNKALAAAIVKAFVTDRGVDGLDIDIEHEFTNKRTPEEDARALNVFKEIAQLIGKNGSDKSKLLIMDTTLSVENNPIFKGIAEDLDYLLRQYYGSQGGEAEVDTINSDWNQYQNYIDASQFMIGFSFFEESASKGNLWFDVNEYDPNNPEKGKDIEGTRAKKYAEWQPSTGGLKAGIFSYAIDRDGVAHVPSTYKNRTSTNLQRHEVDNISHTDYTVSRKLKTLMTEDKRYDVIDQKDIPDPALREQIIQQVGQYKGDLERYNKTLVLTGDKIQNLKGLEKLSKLQKLELRQLSNVKEITPELLPESMKKDAELVMVGMTGLEKLNLSGLNRQTLDGIDVNSITHLTSFDISHNSLDLSEKSEDRKLLMTLMEQVSNHQKITVKNTAFENQKPKGYYPQTYDTKEGHYDVDNAEHDILTDFVFGTVTKRNTFIGDEEAFAIYKEGAVDGRQYVSKDYTYEAFRKDYKGYKVHLTASNLGETVTSKVTATTDETYLVDVSDGEKVVHHMKLNIGSGAIMMENLAKGAKVIGTSGDFEQAKKIFDGEKSDRFFTWGQTNWIAFDLGEINLAKEWRLFNAETNTEIKTDSSLNVAKGRLQILKDTTIDLEKMDIKNRKEYLSNDENWTDVAQMDDAKAIFNSKLSNVLSRYWRFCVDGGASSYYPQYTELQILGQRLSNDVANTLKD

SEQ ID NO: 137 - DNA, 3858 bp, Artificial Sequence
  SYNTHETIC FUSION PROTEN
atgggcagcagccatcatcatcatcatcacagcagcggcctggtgccgcgcggcagccatatgcaggaagcaaaaaaagaaattccgctgaaatatggcgccaccaatgaaggtaaacgtcaggaccctgccatgcagaaatttcgtgataatcgtctgggcgcatttattcattggggcctgtatgcaattccgggtggtgaatggaatggtaaagtgtatggtggtgcagcagaatggctgaaaagttgggcaaaagttccggccgatgaatggctgaagctgatggatcagtggaatccgaccaaatttgatgcaaaaaaatgggccaaaatggccaaagaaatgggcaccaaatatgtgaaaattaccaccaaacatcacgaaggcttttgcctgtggccgagtaaatataccaaatataccgtggccaataccccgtataaacgtgatattctgggcgaactggttaaagcctataatgatgaaggtattgatgttcatttctactttagcgtgatggattggagcaatccggattatcgttatgatattaaaagcaaagaggacagtatcgcctttagtcgctttctggaatttaccgataatcagctgaaagaactggccacccgttatccgaccgttaaagatttttggtttgatggtacctgggatgcaagcgtgaaaaaaaatggttggtggaccgcacatgcagaacagatgctgaaagaattagttccgggtgttgcaattaatagtcgcctgcgtgcagatgataaaggtaaacgtcattttgatagcaatggccgtctgatgggcgattatgaaagtggttatgaacgtcgtctgccggaccctgtgaaagatctgaaagtgacccagtgggattgggaagcatgcatgaccattccggaaaatcagtggggctatcataaagattggagtctgagttatgttaaaaccccgattgaagtgattgatcgtattgtgcatgccgttagcatgggtggtaatatggtggtgaattttggtccgcaggcagatggtgattttcgtccggaagaaaaagcaatggcaaccgcaattggtaaatggatgaatcgctatggtaaagcagtttatgcctgtgattatgccggttttgaaaaacaggattggggttattatacccgcggtaaaaatgatgaagtttatatggttgtgttcaaccagccgtatagcgaacgtctgattgttaaaacccctaaaggtattaccgtggaaaaagcaaccctgctgaccaccggcgaagatattaccgttgtggaaaccacccgtaatgaatataatgttagtgttccgaaaaagaacccgggcgaaccgtatgttattcagctgaaagttcgtgcagccaaaggcaccaaaagtatttatcgtgatgccctgacgggatccgaggagaagactgttcaaacaggaaagacagatcagcaggttggtgctaaattggtacaggaaatccgtgaaggaaaacgcggaccactatatgctggttattttaggacatggcatgatcgtgcttcaacaggaatagatggtaaacagcaacatccagaaaatactatggctgaggtcccaaaagaagttgatatcttatttgtttttcatgaccatacagcttcagatagtccattttggtctgaattaaaggacagttatgtccataaattacatcaacagggaacggcacttgttcagatgattggtgttaacgaattaaatggacgtacaggtttatctaaagattatcctgatactcctgaggggaacaaagctttagcagcagccattgtcaaggcatttgtaactgatcgtggtgtcgatggactagatattgatattgagcacgaatttacgaacaaaagaacacctgaagaagatgctcgtgctctaaatgtttttaaagagattgcgcagttaataggtaaaaatggtagtgataaatctaaattgctcatcatggacactaccctaagtgttgaaaataatccaatatttaaagggatagcggaagatcttgattatcttcttagacaatattatggttcacaaggtggagaagctgaagtggatactataaactctgattggaaccaatatcagaattatattgatgctagccagttcatgattggattctccttttttgaagaatctgcgtccaaagggaatttatggtttgatgttaacgaatacgaccctaacaatcctgaaaaagggaaagatattgaaggaacacgtgctaaaaaatatgcagagtggcaacctagtacaggtggtttaaaagcaggtatattctcttatgctattgatcgtgatggagtggctcatgttccttcaacatataaaaataggactagtacaaatttacaacggcatgaagtcgataatatctcacatactgactacaccgtatctcgaaaattaaaaacattgatgaccgaagacaaacgctatgatgtcattgatcaaaaagacattcctgacccagcattaagagaacaaatcattcaacaagttggacagtataaaggcgatttggaacgttataacaagacattggtgcttacaggagataagattcaaaatcttaaaggactagaaaaattaagcaagttacaaaaattagagttgcgccagctatctaacgttaaagaaattactccagaacttttgccggaaagcatgaaaaaagatgctgagcttgttatggtaggcatgactggtttagaaaaactaaaccttagtggtctaaatcgtcaaactttagacggtatagacgtgaatagtattacgcatttgacatcatttgatatttcacataatagtttggacttgtcggaaaagagtgaagaccgtaaactattaatgactttgatggagcaggtttcaaatcatcaaaaaataacggtgaaaaatacggcttttgaaaatcaaaaaccgaaaggttattatcctcagacgtatgataccaaagaaggtcattatgatgttgataatgcagaacatgatattttaactgattttgtttttggaactgttactaaacgtaatacctttattggagacgaagaagcatttgctatctataaagaaggagctgtcgatggtcgacaatatgtgtctaaagactatacttatgaagcttttcgtaaagactataaaggttacaaggttcatttaactgcttctaacctaggagaaacagttacttctaaggtaactgctactactgatgaaacttacttagtagatgtttctgatggggaaaaagttgttcaccacatgaaactcaatataggatctggtgccatcatgatggaaaatctggcaaaaggggctaaagtgattggtacatctggggactttgagcaagcaaagaagattttcgatggtgaaaagtcagatagattcttcacttggggacaaactaactggatagcttttgatctaggagaaattaatcttgcgaaggaatggcgtttatttaatgcagagacaaatactgaaataaagacagatagtagcttaaacgtggctaaaggacgtcttcagattttaaaagatacaactattgatttagaaaaaatggacataaaaaatcgtaaagagtatctgtcgaatgatgaaaattggactgatgttgctcagatggatgatgcaaaagcgatatttaatagtaaattatccaatgttttatctcggtattggcggttttgtgtagatggtggagctagctcttattaccctcaatataccgaacttcaaatcctcggacaacgtttatcaaatgatgtcgctaatacgctgaaggattaa

SEQ ID NO: 138 - protein, 1285 aa, Artificial Sequence
  SYNTHETIC FUSION PROTEN
MGSSHHHHHHSSGLVPRGSHMQEAKKEIPLKYGATNEGKRQDPAMQKFRDNRLGAFIHWGLYAIPGGEWNGKVYGGAAEWLKSWAKVPADEWLKLMDQWNPTKFDAKKWAKMAKEMGTKYVKITTKHHEGFCLWPSKYTKYTVANTPYKRDILGELVKAYNDEGIDVHFYFSVMDWSNPDYRYDIKSKEDSIAFSRFLEFTDNQLKELATRYPTVKDFWFDGTWDASVKKNGWWTAHAEQMLKELVPGVAINSRLRADDKGKRHFDSNGRLMGDYESGYERRLPDPVKDLKVTQWDWEACMTIPENQWGYHKDWSLSYVKTPIEVIDRIVHAVSMGGNMVVNFGPQADGDFRPEEKAMATAIGKWMNRYGKAVYACDYAGFEKQDWGYYTRGKNDEVYMVVFNQPYSERLIVKTPKGITVEKATLLTTGEDITVVETTRNEYNVSVPKKNPGEPYVIQLKVRAAKGTKSIYRDALTGSEEKTVQTGKTDQQVGAKLVQEIREGKRGPLYAGYFRTWHDRASTGIDGKQQHPENTMAEVPKEVDILFVFHDHTASDSPFWSELKDSYVHKLHQQGTALVQMIGVNELNGRTGLSKDYPDTPEGNKALAAAIVKAFVTDRGVDGLDIDIEHEFTNKRTPEEDARALNVFKEIAQLIGKNGSDKSKLLIMDTTLSVENNPIFKGIAEDLDYLLRQYYGSQGGEAEVDTINSDWNQYQNYIDASQFMIGFSFFEESASKGNLWFDVNEYDPNNPEKGKDIEGTRAKKYAEWQPSTGGLKAGIFSYAIDRDGVAHVPSTYKNRTSTNLQRHEVDNISHTDYTVSRKLKTLMTEDKRYDVIDQKDIPDPALREQIIQQVGQYKGDLERYNKTLVLTGDKIQNLKGLEKLSKLQKLELRQLSNVKEITPELLPESMKKDAELVMVGMTGLEKLNLSGLNRQTLDGIDVNSITHLTSFDISHNSLDLSEKSEDRKLLMTLMEQVSNHQKITVKNTAFENQKPKGYYPQTYDTKEGHYDVDNAEHDILTDFVFGTVTKRNTFIGDEEAFAIYKEGAVDGRQYVSKDYTYEAFRKDYKGYKVHLTASNLGETVTSKVTATTDETYLVDVSDGEKVVHHMKLNIGSGAIMMENLAKGAKVIGTSGDFEQAKKIFDGEKSDRFFTWGQTNWIAFDLGEINLAKEWRLFNAETNTEIKTDSSLNVAKGRLQILKDTTIDLEKMDIKNRKEYLSNDENWTDVAQMDDAKAIFNSKLSNVLSRYWRFCVDGGASSYYPQYTELQILGQRLSNDVANTLKD

SEQ ID NO: 139 - DNA, 3858 bp, Artificial Sequence
  SYNTHETIC FUSION PROTEN
atgggcagcagccatcatcatcatcatcacagcagcggcctggtgccgcgcggcagccatatgcaggaagcaaaaaaagaaattccgctgaaatatggcgccaccaatgaaggtaaacgtcaggaccctgccatgcagaaatttcgtgataatcgtctgggcgcatttattcattggggcctgtatgcaattccgggtggtgaatggaatggtaaagtgtatggtggtgcagcagaatggctgaaaagttgggcaaaagttccggccgatgaatggctgaagctgatggatcagtggaatccgaccaaatttgatgcaaaaaaatgggccaaaatggccaaagaaatgggcaccaaatatgtgaaaattaccaccaaacatcacgaaggcttttgcctgtggccgagtaaatataccaaatataccgtggccaataccccgtataaacgtgatattctgggcgaactggttaaagcctataatgatgaaggtattgatgttcatttctactttagcgtgatggattggagcaatccggattatcgttatgatattaaaagcaaagaggacagtatcgcctttagtcgctttctggaatttaccgataatcagctgaaagaactggccacccgttatccgaccgttaaagatttttggtttgatggtacctgggatgcaagcgtgaaaaaaaatggttggtggaccgcacatgcagaacagatgctgaaagaattagttccgggtgttgcaattaatagtcgcctgcgtgcagatgataaaggtaaacgtcattttgatagcaatggccgtctgatgggcgattatgaaagtggttatgaacgtcgtctgccggaccctgtgaaagatctgaaagtgacccagtgggattgggaagcatgcatgaccattccggaaaatcagtggggctatcataaagattggagtctgagttatgttaaaaccccgattgaagtgattgatcgtattgtgcatgccgttagcatgggtggtaatatggtggtgaattttggtccgcaggcagatggtgattttcgtccggaagaaaaagcaatggcaaccgcaattggtaaatggatgaatcgctatggtaaagcagtttatgcctgtgattatgccggttttgaaaaacaggattggggttattatacccgcggtaaaaatgatgaagtttatatggttgtgttcaaccagccgtatagcgaacgtctgattgttaaaacccctaaaggtattaccgtggaaaaagcaaccctgctgaccaccggcgaagatattaccgttgtggaaaccacccgtaatgaatataatgttagtgttccgaaaaagaacccgggcgaaccgtatgttattcagctgaaagttcgtgcagccaaaggcaccaaaagtatttatcgtgatgccctgacgggatccgaggagaagactgttcaaacaggaaagacagatcagcaggttggtgctaaattggtacaggaaatccgtgaaggaaaacgcggaccactatatgctggttattttaggacatggcatgatcgtgcttcaacaggaatagatggtaaacagcaacatccagaaaatactatggctgaggtcccaaaagaagttgatatcttatttgtttttcatgaccatacagcttcagatagtccattttggtctgaattaaaggacagttatgtccataaattacatcaacagggaacggcacttgttcagacaattggtgttaacgaattaaatggacgtacaggtttatctaaagattatcctgatactcctgaggggaacaaagctttagcagcagccattgtcaaggcatttgtaactgatcgtggtgtcgatggactagatattatgattgagcacgaatttacgaacaaaagaacacctgaagaagatgctcgtgctctaaatgtttttaaagagattgcgcagttaataggtaaaaatggtagtgataaatctaaattgctcatcatggacactaccctaagtgttgaaaataatccaatatttaaagggatagcggaagatcttgattatcttcttagacaatattatggttcacaaggtggagaagctgaagtggatactataaactctgattggaaccaatatcagaattatattgatgctagccagttcatgattggattctccttttttgaagaatctgcgtccaaagggaatttatggtttgatgttaacgaatacgaccctaacaatcctgaaaaagggaaagatattgaaggaacacgtgctaaaaaatatgcagagtggcaacctagtacaggtggtttaaaagcaggtatattctcttatgctattgatcgtgatggagtggctcatgttccttcaacatataaaaataggactagtacaaatttacaacggcatgaagtcgataatatctcacatactgactacaccgtatctcgaaaattaaaaacattgatgaccgaagacaaacgctatgatgtcattgatcaaaaagacattcctgacccagcattaagagaacaaatcattcaacaagttggacagtataaaggcgatttggaacgttataacaagacattggtgcttacaggagataagattcaaaatcttaaaggactagaaaaattaagcaagttacaaaaattagagttgcgccagctatctaacgttaaagaaattactccagaacttttgccggaaagcatgaaaaaagatgctgagcttgttatggtaggcatgactggtttagaaaaactaaaccttagtggtctaaatcgtcaaactttagacggtatagacgtgaatagtattacgcatttgacatcatttgatatttcacataatagtttggacttgtcggaaaagagtgaagaccgtaaactattaatgactttgatggagcaggtttcaaatcatcaaaaaataacggtgaaaaatacggcttttgaaaatcaaaaaccgaaaggttattatcctcagacgtatgataccaaagaaggtcattatgatgttgataatgcagaacatgatattttaactgattttgtttttggaactgttactaaacgtaatacctttattggagacgaagaagcatttgctatctataaagaaggagctgtcgatggtcgacaatatgtgtctaaagactatacttatgaagcttttcgtaaagactataaaggttacaaggttcatttaactgcttctaacctaggagaaacagttacttctaaggtaactgctactactgatgaaacttacttagtagatgtttctgatggggaaaaagttgttcaccacatgaaactcaatataggatctggtgccatcatgatggaaaatctggcaaaaggggctaaagtgattggtacatctggggactttgagcaagcaaagaagattttcgatggtgaaaagtcagatagattcttcacttggggacaaactaactggatagcttttgatctaggagaaattaatcttgcgaaggaatggcgtttatttaatgcagagacaaatactgaaataaagacagatagtagcttaaacgtggctaaaggacgtcttcagattttaaaagatacaactattgatttagaaaaaatggacataaaaaatcgtaaagagtatctgtcgaatgatgaaaattggactgatgttgctcagatggatgatgcaaaagcgatatttaatagtaaattatccaatgttttatctcggtattggcggttttgtgtagatggtggagctagctcttattaccctcaatataccgaacttcaaatcctcggacaacgtttatcaaatgatgtcgctaatacgctgaaggattaa

SEQ ID NO: 140 - protein, 1285 aa, Artificial Sequence
  SYNTHETIC FUSION PROTEN
MGSSHHHHHHSSGLVPRGSHMQEAKKEIPLKYGATNEGKRQDPAMQKFRDNRLGAFIHWGLYAIPGGEWNGKVYGGAAEWLKSWAKVPADEWLKLMDQWNPTKFDAKKWAKMAKEMGTKYVKITTKHHEGFCLWPSKYTKYTVANTPYKRDILGELVKAYNDEGIDVHFYFSVMDWSNPDYRYDIKSKEDSIAFSRFLEFTDNQLKELATRYPTVKDFWFDGTWDASVKKNGWWTAHAEQMLKELVPGVAINSRLRADDKGKRHFDSNGRLMGDYESGYERRLPDPVKDLKVTQWDWEACMTIPENQWGYHKDWSLSYVKTPIEVIDRIVHAVSMGGNMVVNFGPQADGDFRPEEKAMATAIGKWMNRYGKAVYACDYAGFEKQDWGYYTRGKNDEVYMVVFNQPYSERLIVKTPKGITVEKATLLTTGEDITVVETTRNEYNVSVPKKNPGEPYVIQLKVRAAKGTKSIYRDALTGSEEKTVQTGKTDQQVGAKLVQEIREGKRGPLYAGYFRTWHDRASTGIDGKQQHPENTMAEVPKEVDILFVFHDHTASDSPFWSELKDSYVHKLHQQGTALVQTIGVNELNGRTGLSKDYPDTPEGNKALAAAIVKAFVTDRGVDGLDIMIEHEFTNKRTPEEDARALNVFKEIAQLIGKNGSDKSKLLIMDTTLSVENNPIFKGIAEDLDYLLRQYYGSQGGEAEVDTINSDWNQYQNYIDASQFMIGFSFFEESASKGNLWFDVNEYDPNNPEKGKDIEGTRAKKYAEWQPSTGGLKAGIFSYAIDRDGVAHVPSTYKNRTSTNLQRHEVDNISHTDYTVSRKLKTLMTEDKRYDVIDQKDIPDPALREQIIQQVGQYKGDLERYNKTLVLTGDKIQNLKGLEKLSKLQKLELRQLSNVKEITPELLPESMKKDAELVMVGMTGLEKLNLSGLNRQTLDGIDVNSITHLTSFDISHNSLDLSEKSEDRKLLMTLMEQVSNHQKITVKNTAFENQKPKGYYPQTYDTKEGHYDVDNAEHDILTDFVFGTVTKRNTFIGDEEAFAIYKEGAVDGRQYVSKDYTYEAFRKDYKGYKVHLTASNLGETVTSKVTATTDETYLVDVSDGEKVVHHMKLNIGSGAIMMENLAKGAKVIGTSGDFEQAKKIFDGEKSDRFFTWGQTNWIAFDLGEINLAKEWRLFNAETNTEIKTDSSLNVAKGRLQILKDTTIDLEKMDIKNRKEYLSNDENWTDVAQMDDAKAIFNSKLSNVLSRYWRFCVDGGASSYYPQYTELQILGQRLSNDVANTLKD

SEQ ID NO: 141 - DNA, 3063 bp, Artificial Sequence
  SYNTHETIC FUSION PROTEN
atgggcagcagccatcatcatcatcatcacagcagcggcctggtgccgcgcggcagccatatgggtaccctgcagggatccaaagataagtcgtatgatctgattgatgagaaagatttcccagataaggctttgcgagaagctgtgatggcgcaggttggaaccagaaaaggtgatttggaacgtttcaatggcacattacgattggataatccagcgattcaaagtttagaaggtctaaataaatttaaaaaattagctcaattagacttgattggcttatctcgcattacaaagctcgaccgttctgttttacccgctaatatgaagccaggcaaagataccttggaaacagttcttgaaacctataaaaaggataacaaagaagaacctgctactatcccaccagtatctttgaaggtttctggtttaactggtctgaaagaattagatttgtcaggttttgaccgtgaaaccttggctggtcttgatgccgctactctaacgtctttagaaaaagttgatatttctggcaacaaacttgatttggctccaggaacagaaaatcgacaaatttttgatactatgctatcaactatcagcaatcatgttggaagcaatgaacaaacagtgaaatttgacaagcaaaaaccaactgggcattacccagatacctatgggaaaactagtctgcgcttaccagtggcaaatgaaaaagttgatttgcaaagccagcttttgtttgggactgtgacaaatcaaggaaccctaatcaatagcgaagcagactataaggcttaccaaaatcataaaattgctggacgtagctttgttgattcaaactatcattacaataactttaaagtttcttatgagaactataccgttaaagtaactgattccacattgggaaccactactgacaaaacgctagcaactgataaagaagagacctataaggttgacttctttagcccagcagataagacaaaagctgttcatactgctaaagtgattgttggtgacgaaaaaaccatgatggttaatttggcagaaggcgcaacagttattggaggaagtgctgatcctgtaaatgcaagaaaggtatttgatgggcaactgggcagtgagactgataatatctctttaggatgggattctaagcaaagtattatatttaaattgaaagaagatggattaataaagcattggcgtttcttcaatgattcagcccgaaatcctgagacaaccaataaacctattcaggaagcaagtctacaaatttttaatatcaaagattataatctagataatttgttggaaaatcccaataaatttgatgatgaaaaatattggattactgtagatacttacagtgcacaaggagagagagctactgcattcagtaatacattaaataatattactagtaaatattggcgagttgtctttgatactaaaggagatagatatagttcgccagtagtccctgaactccaaattttaggttatccgttacctaacgccgacactatcatgaaaacagtaactactgctaaagagttatctcaacaaaaagataagttttctcaaaagatgcttgatgagttaaaaataaaagagatggctttagaaacttctttgaacagtaagatttttgatgtaactgctattaatgctaatgctggagttttgaaagattgtattgagaaaaggcagctgctaaaaaaaggcggtgcacagtatcaggcaaattggcagagtctggatcagcgcccgaccccggcatggtttgaagatgccaaatttggcatttttatccattggggcctgtatagtgtgccgagctgggcaaccaaaagtaatgccgatggctttggtagcggctatagtgaatggtattggcagcgtctgtttgcaaaaaatctgaaaattcatccggaatttgtggaatttcataaaaaaaacttcggcgataagaactatcaggattttgtgcagaattttaaggcagaactgtttcagccgaatgattgggcaaatatttttgaacaggcaggcgccaaatatgttgtgctgaccagtaaacatcatgaaggttttaccctgtggccgagcaaagaaagctggaattggaatagtgttgatgtgggcccgcatcgtgatctggcaggtgatctgatgaccgccgtgcgtgcaaaaaatttaaaaatgggttattactacagcctgtatgaatggtttaatccggtttataaagccgatgtgaatacctatgttagcgaacgtatgctgccgcagatgaaagatctggttacccgctataaaccggatattctgtggaccgatggcgaatgggattatccggcaaaaacctggcgtagcgaagaatttctggcatggctgtttaatgaaagtaatgttaaaaacgagatcgtggttaatgatcgttggggtagtgataccaaaagcaaacatggtagctttgccaccagtgaatatggccacggtggtaccgataataccgaaaccaccggtggctttcagcgtccgtgggaagaatgccgtggtatgggtgaaagttttggctataatcgtaatgaaaacctggatagctatcagaccggcgaagcactggtgcatcagctgattgatattgttgccaaaggcggtaatctgctgctgaatattggcccggcagccgatggcaccattccggttattatgcaggaacgcctgcatgaaattggcagctggctgaaagttaatggcagcgcaatttatggcacccgtcgctggagcaaagcaccggcatataccaaagaaagtaccctgtattttacccagaaaggtaaaaatctgaacgcaattacccgcaaatgggaagaaaccattagcattcagaatgtggcaaaaccgagtaaagttaccctgctgggttataaaggtgaagttaaatttacctacaagaacggtaccctgaccattatggccccgagcgtgaatccgagcaatattccgtgtcagtatgcctggacctatgaaattgaaaatgcactgtaa

SEQ ID NO: 142 - protein, 1035 aa, Artificial Sequence; identical to SEQ ID NO: 110
  SYNTHETIC FUSION PROTEN

SEQ ID NO: 143 - DNA, 2790 bp, Artificial Sequence
  SYNTHETIC FUSION PROTEN
atgggcagcagccatcatcatcatcatcacagcagcggcctggtgccgcgcggcagccatatgggtaccctgcagggatccaccgaagacaaacgctatgatgtcattgatcaaaaagacattcctgacccagcattaagagaacaaatcattcaacaagttggacagtataaaggcgatttggaacgttataacaagacattggtgcttacaggagataagattcaaaatcttaaaggactagaaaaattaagcaagttacaaaaattagagttgcgccagctatctaacgttaaagaaattactccagaacttttgccggaaagcatgaaaaaagatgctgagcttgttatggtaggcatgactggtttagaaaaactaaaccttagtggtctaaatcgtcaaactttagacggtatagacgtgaatagtattacgcatttgacatcatttgatatttcacataatagtttggacttgtcggaaaagagtgaagaccgtaaactattaatgactttgatggagcaggtttcaaatcatcaaaaaataacggtgaaaaatacggcttttgaaaatcaaaaaccgaaaggttattatcctcagacgtatgataccaaagaaggtcattatgatgttgataatgcagaacatgatattttaactgattttgtttttggaactgttactaaacgtaatacctttattggagacgaagaagcatttgctatctataaagaaggagctgtcgatggtcgacaatatgtgtctaaagactatacttatgaagcttttcgtaaagactataaaggttacaaggttcatttaactgcttctaacctaggagaaacagttacttctaaggtaactgctactactgatgaaacttacttagtagatgtttctgatggggaaaaagttgttcaccacatgaaactcaatataggatctggtgccatcatgatggaaaatctggcaaaaggggctaaagtgattggtacatctggggactttgagcaagcaaagaagattttcgatggtgaaaagtcagatagattcttcacttggggacaaactaactggatagcttttgatctaggagaaattaatcttgcgaaggaatggcgtttatttaatgcagagacaaatactgaaataaagacagatagtagcttaaacgtggctaaaggacgtcttcagattttaaaagatacaactattgatttagaaaaaatggacataaaaaatcgtaaagagtatctgtcgaatgatgaaaattggactgatgttgctcagatggatgatgcaaaagcgatatttaatagtaaattatccaatgttttatctcggtattggcggttttgtgtagatggtggagctagctcttattaccctcaatataccgaacttcaaatcctcggacaacgtttatcaaatgatgtcgctaatacgctgaaggatggcggtgcacagtatcaggcaaattggcagagtctggatcagcgcccgaccccggcatggtttgaagatgccaaatttggcatttttatccattggggcctgtatagtgtgccgagctgggcaaccaaaagtaatgccgatggctttggtagcggctatagtgaatggtattggcagcgtctgtttgcaaaaaatctgaaaattcatccggaatttgtggaatttcataaaaaaaacttcggcgataagaactatcaggattttgtgcagaattttaaggcagaactgtttcagccgaatgattgggcaaatatttttgaacaggcaggcgccaaatatgttgtgctgaccagtaaacatcatgaaggttttaccctgtggccgagcaaagaaagctggaattggaatagtgttgatgtgggcccgcatcgtgatctggcaggtgatctgatgaccgccgtgcgtgcaaaaaatttaaaaatgggttattactacagcctgtatgaatggtttaatccggtttataaagccgatgtgaatacctatgttagcgaacgtatgctgccgcagatgaaagatctggttacccgctataaaccggatattctgtggaccgatggcgaatgggattatccggcaaaaacctggcgtagcgaagaatttctggcatggctgtttaatgaaagtaatgttaaaaacgagatcgtggttaatgatcgttggggtagtgataccaaaagcaaacatggtagctttgccaccagtgaatatggccacggtggtaccgataataccgaaaccaccggtggctttcagcgtccgtgggaagaatgccgtggtatgggtgaaagttttggctataatcgtaatgaaaacctggatagctatcagaccggcgaagcactggtgcatcagctgattgatattgttgccaaaggcggtaatctgctgctgaatattggcccggcagccgatggcaccattccggttattatgcaggaacgcctgcatgaaattggcagctggctgaaagttaatggcagcgcaatttatggcacccgtcgctggagcaaagcaccggcatataccaaagaaagtaccctgtattttacccagaaaggtaaaaatctgaacgcaattacccgcaaatgggaagaaaccattagcattcagaatgtggcaaaaccgagtaaagttaccctgctgggttataaaggtgaagttaaatttacctacaagaacggtaccctgaccattatggccccgagcgtgaatccgagcaatattccgtgtcagtatgcctggacctatgaaattgaaaatgcactgtaa

SEQ ID NO: 144 - protein, 929 aa, Artificial Sequence
  SYNTHETIC FUSION PROTEN
MGSSHHHHHHSSGLVPRGSHMGTLQGSTEDKRYDVIDQKDIPDPALREQIIQQVGQYKGDLERYNKTLVLTGDKIQNLKGLEKLSKLQKLELRQLSNVKEITPELLPESMKKDAELVMVGMTGLEKLNLSGLNRQTLDGIDVNSITHLTSFDISHNSLDLSEKSEDRKLLMTLMEQVSNHQKITVKNTAFENQKPKGYYPQTYDTKEGHYDVDNAEHDILTDFVFGTVTKRNTFIGDEEAFAIYKEGAVDGRQYVSKDYTYEAFRKDYKGYKVHLTASNLGETVTSKVTATTDETYLVDVSDGEKVVHHMKLNIGSGAIMMENLAKGAKVIGTSGDFEQAKKIFDGEKSDRFFTWGQTNWIAFDLGEINLAKEWRLFNAETNTEIKTDSSLNVAKGRLQILKDTTIDLEKMDIKNRKEYLSNDENWTDVAQMDDAKAIFNSKLSNVLSRYWRFCVDGGASSYYPQYTELQILGQRLSNDVANTLKDGGAQYQANWQSLDQRPTPAWFEDAKFGIFIHWGLYSVPSWATKSNADGFGSGYSEWYWQRLFAKNLKIHPEFVEFHKKNFGDKNYQDFVQNFKAELFQPNDWANIFEQAGAKYVVLTSKHHEGFTLWPSKESWNWNSVDVGPHRDLAGDLMTAVRAKNLKMGYYYSLYEWFNPVYKADVNTYVSERMLPQMKDLVTRYKPDILWTDGEWDYPAKTWRSEEFLAWLFNESNVKNEIVVNDRWGSDTKSKHGSFATSEYGHGGTDNTETTGGFQRPWEECRGMGESFGYNRNENLDSYQTGEALVHQLIDIVAKGGNLLLNIGPAADGTIPVIMQERLHEIGSWLKVNGSAIYGTRRWSKAPAYTKESTLYFTQKGKNLNAITRKWEETISIQNVAKPSKVTLLGYKGEVKFTYKNGTLTIMAPSVNPSNIPCQYAWTYEIENAL

SEQ ID NO: 145 - DNA, 4338 bp, Artificial Sequence
  SYNTHETIC FUSION PROTEN
atgggcagcagccatcatcatcatcatcacagcagcggcctggtgccgcgcggcagccatatgacccaccatgattcactcaatactgtaaaagcggaggagaagactgttcaggttcagaaaggattaccttctatcgatagcttgcattatctgtcagagaatagcaaaaaagaatttaaagaagaactctcaaaagcggggcaagaatctcaaaaggtcaaagagatattagcaaaagctcagcaggcagataaacaagctcaagaacttgccaaaatgaaaattcctgagaaaataccgatgaaaccgttacatggttctctctacggtggttactttagaacttggcatgacaaaacatcagatccaacagaaaaagacaaagttaactcgatgggagagcttcctaaagaagtagatctagcctttattttccacgattggacaaaagattatagccttttttggaaagaattggccaccaaacatgtgccaaagttaaacaagcaagggacacgtgtcattcgtaccattccatggcgtttcctagctgggggtgataacagtggtattgcagaagataccagtaaatacccaaatacaccagagggaaataaagctttagccaaagctattgttgatgaatatgtttataaatacaaccttgatggcttagatgtggatgttgaacatgatagtattccaaaagttgacaaaaaagaagatacagcaggcgtagaacgctctattcaagtgtttgaagaaattgggaaattaattggaccaaaaggtgttgataaatcgcggttatttattatggatagcacctacatggctgataaaaacccattgattgagcgaggagctccttatattaatttattactggtacaggtctatggttcacaaggagagaaaggtggttgggagcctgtttctaatcgacctgaaaaaacaatggaagaacgatggcaaggttatagcaagtatattcgtcctgaacaatacatgattggtttttctttctatgaggaaaatgctcaagaagggaatctttggtatgatattaattctcgcaaggacgaggacaaagcaaatggaattaacactgacataactggaacgcgtgccgaacggtatgcaaggtggcaacctaagacaggtggggttaagggaggtatcttctcctacgctattgaccgagatggtgtagctcatcaacctaaaaaatatgctaaacagaaagagtttaaggacgcaactgataacatcttccactcagattatagtgtctccaaggcattaaagacagttatgctaaaagataagtcgtatgatctgattgatgagaaagatttcccagataaggctttgcgagaagctgtgatggcgcaggttggaaccagaaaaggtgatttggaacgtttcaatggcacattacgattggataatccagcgattcaaagtttagaaggtctaaataaatttaaaaaattagctcaattagacttgattggcttatctcgcattacaaagctcgaccgttctgttttacccgctaatatgaagccaggcaaagataccttggaaacagttcttgaaacctataaaaaggataacaaagaagaacctgctactatcccaccagtatctttgaaggtttctggtttaactggtctgaaagaattagatttgtcaggttttgaccgtgaaaccttggctggtcttgatgccgctactctaacgtctttagaaaaagttgatatttctggcaacaaacttgatttggctccaggaacagaaaatcgacaaatttttgatactatgctatcaactatcagcaatcatgttggaagcaatgaacaaacagtgaaatttgacaagcaaaaaccaactgggcattacccagatacctatgggaaaactagtctgcgcttaccagtggcaaatgaaaaagttgatttgcaaagccagcttttgtttgggactgtgacaaatcaaggaaccctaatcaatagcgaagcagactataaggcttaccaaaatcataaaattgctggacgtagctttgttgattcaaactatcattacaataactttaaagtttcttatgagaactataccgttaaagtaactgattccacattgggaaccactactgacaaaacgctagcaactgataaagaagagacctataaggttgacttctttagcccagcagataagacaaaagctgttcatactgctaaagtgattgttggtgacgaaaaaaccatgatggttaatttggcagaaggcgcaacagttattggaggaagtgctgatcctgtaaatgcaagaaaggtatttgatgggcaactgggcagtgagactgataatatctctttaggatgggattctaagcaaagtattatatttaaattgaaagaagatggattaataaagcattggcgtttcttcaatgattcagcccgaaatcctgagacaaccaataaacctattcaggaagcaagtctacaaatttttaatatcaaagattataatctagataatttgttggaaaatcccaataaatttgatgatgaaaaatattggattactgtagatacttacagtgcacaaggagagagagctactgcattcagtaatacattaaataatattactagtaaatattggcgagttgtctttgatactaaaggagatagatatagttcgccagtagtccctgaactccaaattttaggttatccgttacctaacgccgacactatcatgaaaacagtaactactgctaaagagttatctcaacaaaaagataagttttctcaaaagatgcttgatgagttaaaaataaaagagatggctttagaaacttctttgaacagtaagatttttgatgtaactgctattaatgctaatgctggagttttgaaagattgtattgagaaaaggcagctgctaaaaaaaggatccggtgctcagtatcaggcaaattggcagagtctggatcagcgcccgaccccggcatggtttgaagatgccaaatttggcatttttatccattggggcctgtatagtgtgccgagctgggcaaccaaaagtaatgccgatggctttggtagcggctatagtgaatggtattggcagcgtctgtttgcaaaaaatctgaaaattcatccggaatttgtggaatttcataaaaaaaacttcggcgataagaactatcaggattttgtgcagaattttaaggcagaactgtttcagccgaatgattgggcaaatatttttgaacaggcaggcgccaaatatgttgtgctgaccagtaaacatcatgaaggttttaccctgtggccgagcaaagaaagctggaattggaatagtgttgatgtgggcccgcatcgtgatctggcaggtgatctgatgaccgccgtgcgtgcaaaaaatttaaaaatgggttattactacagcctgtatgaatggtttaatccggtttataaagccgatgtgaatacctatgttagcgaacgtatgctgccgcagatgaaagatctggttacccgctataaaccggatattctgtggaccgatggcgaatgggattatccggcaaaaacctggcgtagcgaagaatttctggcatggctgtttaatgaaagtaatgttaaaaacgagatcgtggttaatgatcgttggggtagtgataccaaaagcaaacatggtagctttgccaccagtgaatatggccacggtggtaccgataataccgaaaccaccggtggctttcagcgtccgtgggaagaatgccgtggtatgggtgaaagttttggctataatcgtaatgaaaacctggatagctatcagaccggcgaagcactggtgcatcagctgattgatattgttgccaaaggcggtaatctgctgctgaatattggcccggcagccgatggcaccattccggttattatgcaggaacgcctgcatgaaattggcagctggctgaaagttaatggcagcgcaatttatggcacccgtcgctggagcaaagcaccggcatataccaaagaaagtaccctgtattttacccagaaaggtaaaaatctgaacgcaattacccgcaaatgggaagaaaccattagcattcagaatgtggcaaaaccgagtaaagttaccctgctgggttataaaggtgaagttaaatttacctacaagaacggtaccctgaccattatggccccgagcgtgaatccgagcaatattccgtgtcagtatgcctggacctatgaaattgaaaatgcactgggtacctggtctcatccgcagttcgagaaataa

SEQ ID NO: 146 - protein, 1445 aa, Artificial Sequence
  SYNTHETIC FUSION PROTEN
MGSSHHHHHHSSGLVPRGSHMTHHDSLNTVKAEEKTVQVQKGLPSIDSLHYLSENSKKEFKEELSKAGQESQKVKEILAKAQQADKQAQELAKMKIPEKIPMKPLHGSLYGGYFRTWHDKTSDPTEKDKVNSMGELPKEVDLAFIFHDWTKDYSLFWKELATKHVPKLNKQGTRVIRTIPWRFLAGGDNSGIAEDTSKYPNTPEGNKALAKAIVDEYVYKYNLDGLDVDVEHDSIPKVDKKEDTAGVERSIQVFEEIGKLIGPKGVDKSRLFIMDSTYMADKNPLIERGAPYINLLLVQVYGSQGEKGGWEPVSNRPEKTMEERWQGYSKYIRPEQYMIGFSFYEENAQEGNLWYDINSRKDEDKANGINTDITGTRAERYARWQPKTGGVKGGIFSYAIDRDGVAHQPKKYAKQKEFKDATDNIFHSDYSVSKALKTVMLKDKSYDLIDEKDFPDKALREAVMAQVGTRKGDLERFNGTLRLDNPAIQSLEGLNKFKKLAQLDLIGLSRITKLDRSVLPANMKPGKDTLETVLETYKKDNKEEPATIPPVSLKVSGLTGLKELDLSGFDRETLAGLDAATLTSLEKVDISGNKLDLAPGTENRQIFDTMLSTISNHVGSNEQTVKFDKQKPTGHYPDTYGKTSLRLPVANEKVDLQSQLLFGTVTNQGTLINSEADYKAYQNHKIAGRSFVDSNYHYNNFKVSYENYTVKVTDSTLGTTTDKTLATDKEETYKVDFFSPADKTKAVHTAKVIVGDEKTMMVNLAEGATVIGGSADPVNARKVFDGQLGSETDNISLGWDSKQSIIFKLKEDGLIKHWRFFNDSARNPETTNKPIQEASLQIFNIKDYNLDNLLENPNKFDDEKYWITVDTYSAQGERATAFSNTLNNITSKYWRVVFDTKGDRYSSPVVPELQILGYPLPNADTIMKTVTTAKELSQQKDKFSQKMLDELKIKEMALETSLNSKIFDVTAINANAGVLKDCIEKRQLLKKGSGAQYQANWQSLDQRPTPAWFEDAKFGIFIHWGLYSVPSWATKSNADGFGSGYSEWYWQRLFAKNLKIHPEFVEFHKKNFGDKNYQDFVQNFKAELFQPNDWANIFEQAGAKYVVLTSKHHEGFTLWPSKESWNWNSVDVGPHRDLAGDLMTAVRAKNLKMGYYYSLYEWFNPVYKADVNTYVSERMLPQMKDLVTRYKPDILWTDGEWDYPAKTWRSEEFLAWLFNESNVKNEIVVNDRWGSDTKSKHGSFATSEYGHGGTDNTETTGGFQRPWEECRGMGESFGYNRNENLDSYQTGEALVHQLIDIVAKGGNLLLNIGPAADGTIPVIMQERLHEIGSWLKVNGSAIYGTRRWSKAPAYTKESTLYFTQKGKNLNAITRKWEETISIQNVAKPSKVTLLGYKGEVKFTYKNGTLTIMAPSVNPSNIPCQYAWTYEIENALGTWSHPQFEK

SEQ ID NO: 147 - DNA, 4338 bp, Artificial Sequence
  SYNTHETIC FUSION PROTEN
atgggcagcagccatcatcatcatcatcacagcagcggcctggtgccgcgcggcagccatatgacccaccatgattcactcaatactgtaaaagcggaggagaagactgttcaggttcagaaaggattaccttctatcgatagcttgcattatctgtcagagaatagcaaaaaagaatttaaagaagaactctcaaaagcggggcaagaatctcaaaaggtcaaagagatattagcaaaagctcagcaggcagataaacaagctcaagaacttgccaaaatgaaaattcctgagaaaataccgatgaaaccgttacatggttctctctacggtggttactttagaacttggcatgacaaaacatcagatccaacagaaaaagacaaagttaactcgatgggagagcttcctaaagaagtagatctagcctttattttccacgattggacaaaagattatagccttttttggaaagaattggccaccaaacatgtgccaaagttaaacaagcaagggacacgtgtcattcgtaccattccatggcgtttcctagctgggggtgataacagtggtattgcagaagataccagtaaatacccaaatacaccagagggaaataaagctttagccaaagctattgttgatgaatatgtttataaatacaaccttgatggcttagatgtgcaggttgaacatgatagtattccaaaagttgacaaaaaagaagatacagcaggcgtagaacgctctattcaagtgtttgaagaaattgggaaattaattggaccaaaaggtgttgataaatcgcggttatttattatggatagcacctacatggctgataaaaacccattgattgagcgaggagctccttatattaatttattactggtacaggtctatggttcacaaggagagaaaggtggttgggagcctgtttctaatcgacctgaaaaaacaatggaagaacgatggcaaggttatagcaagtatattcgtcctgaacaatacatgattggtttttctttctatgaggaaaatgctcaagaagggaatctttggtatgatattaattctcgcaaggacgaggacaaagcaaatggaattaacactgacataactggaacgcgtgccgaacggtatgcaaggtggcaacctaagacaggtggggttaagggaggtatcttctcctacgctattgaccgagatggtgtagctcatcaacctaaaaaatatgctaaacagaaagagtttaaggacgcaactgataacatcttccactcagattatagtgtctccaaggcattaaagacagttatgctaaaagataagtcgtatgatctgattgatgagaaagatttcccagataaggctttgcgagaagctgtgatggcgcaggttggaaccagaaaaggtgatttggaacgtttcaatggcacattacgattggataatccagcgattcaaagtttagaaggtctaaataaatttaaaaaattagctcaattagacttgattggcttatctcgcattacaaagctcgaccgttctgttttacccgctaatatgaagccaggcaaagataccttggaaacagttcttgaaacctataaaaaggataacaaagaagaacctgctactatcccaccagtatctttgaaggtttctggtttaactggtctgaaagaattagatttgtcaggttttgaccgtgaaaccttggctggtcttgatgccgctactctaacgtctttagaaaaagttgatatttctggcaacaaacttgatttggctccaggaacagaaaatcgacaaatttttgatactatgctatcaactatcagcaatcatgttggaagcaatgaacaaacagtgaaatttgacaagcaaaaaccaactgggcattacccagatacctatgggaaaactagtctgcgcttaccagtggcaaatgaaaaagttgatttgcaaagccagcttttgtttgggactgtgacaaatcaaggaaccctaatcaatagcgaagcagactataaggcttaccaaaatcataaaattgctggacgtagctttgttgattcaaactatcattacaataactttaaagtttcttatgagaactataccgttaaagtaactgattccacattgggaaccactactgacaaaacgctagcaactgataaagaagagacctataaggttgacttctttagcccagcagataagacaaaagctgttcatactgctaaagtgattgttggtgacgaaaaaaccatgatggttaatttggcagaaggcgcaacagttattggaggaagtgctgatcctgtaaatgcaagaaaggtatttgatgggcaactgggcagtgagactgataatatctctttaggatgggattctaagcaaagtattatatttaaattgaaagaagatggattaataaagcattggcgtttcttcaatgattcagcccgaaatcctgagacaaccaataaacctattcaggaagcaagtctacaaatttttaatatcaaagattataatctagataatttgttggaaaatcccaataaatttgatgatgaaaaatattggattactgtagatacttacagtgcacaaggagagagagctactgcattcagtaatacattaaataatattactagtaaatattggcgagttgtctttgatactaaaggagatagatatagttcgccagtagtccctgaactccaaattttaggttatccgttacctaacgccgacactatcatgaaaacagtaactactgctaaagagttatctcaacaaaaagataagttttctcaaaagatgcttgatgagttaaaaataaaagagatggctttagaaacttctttgaacagtaagatttttgatgtaactgctattaatgctaatgctggagttttgaaagattgtattgagaaaaggcagctgctaaaaaaaggatccggtgctcagtatcaggcaaattggcagagtctggatcagcgcccgaccccggcatggtttgaagatgccaaatttggcatttttatccattggggcctgtatagtgtgccgagctgggcaaccaaaagtaatgccgatggctttggtagcggctatagtgaatggtattggcagcgtctgtttgcaaaaaatctgaaaattcatccggaatttgtggaatttcataaaaaaaacttcggcgataagaactatcaggattttgtgcagaattttaaggcagaactgtttcagccgaatgattgggcaaatatttttgaacaggcaggcgccaaatatgttgtgctgaccagtaaacatcatgaaggttttaccctgtggccgagcaaagaaagctggaattggaatagtgttgatgtgggcccgcatcgtgatctggcaggtgatctgatgaccgccgtgcgtgcaaaaaatttaaaaatgggttattactacagcctgtatgaatggtttaatccggtttataaagccgatgtgaatacctatgttagcgaacgtatgctgccgcagatgaaagatctggttacccgctataaaccggatattctgtggaccgatggcgaatgggattatccggcaaaaacctggcgtagcgaagaatttctggcatggctgtttaatgaaagtaatgttaaaaacgagatcgtggttaatgatcgttggggtagtgataccaaaagcaaacatggtagctttgccaccagtgaatatggccacggtggtaccgataataccgaaaccaccggtggctttcagcgtccgtgggaagaatgccgtggtatgggtgaaagttttggctataatcgtaatgaaaacctggatagctatcagaccggcgaagcactggtgcatcagctgattgatattgttgccaaaggcggtaatctgctgctgaatattggcccggcagccgatggcaccattccggttattatgcaggaacgcctgcatgaaattggcagctggctgaaagttaatggcagcgcaatttatggcacccgtcgctggagcaaagcaccggcatataccaaagaaagtaccctgtattttacccagaaaggtaaaaatctgaacgcaattacccgcaaatgggaagaaaccattagcattcagaatgtggcaaaaccgagtaaagttaccctgctgggttataaaggtgaagttaaatttacctacaagaacggtaccctgaccattatggccccgagcgtgaatccgagcaatattccgtgtcagtatgcctggacctatgaaattgaaaatgcactgggtacctggtctcatccgcagttcgagaaataa

SEQ ID NO: 148 - protein, 1445 aa, Artificial Sequence
  SYNTHETIC FUSION PROTEN
MGSSHHHHHHSSGLVPRGSHMTHHDSLNTVKAEEKTVQVQKGLPSIDSLHYLSENSKKEFKEELSKAGQESQKVKEILAKAQQADKQAQELAKMKIPEKIPMKPLHGSLYGGYFRTWHDKTSDPTEKDKVNSMGELPKEVDLAFIFHDWTKDYSLFWKELATKHVPKLNKQGTRVIRTIPWRFLAGGDNSGIAEDTSKYPNTPEGNKALAKAIVDEYVYKYNLDGLDVQVEHDSIPKVDKKEDTAGVERSIQVFEEIGKLIGPKGVDKSRLFIMDSTYMADKNPLIERGAPYINLLLVQVYGSQGEKGGWEPVSNRPEKTMEERWQGYSKYIRPEQYMIGFSFYEENAQEGNLWYDINSRKDEDKANGINTDITGTRAERYARWQPKTGGVKGGIFSYAIDRDGVAHQPKKYAKQKEFKDATDNIFHSDYSVSKALKTVMLKDKSYDLIDEKDFPDKALREAVMAQVGTRKGDLERFNGTLRLDNPAIQSLEGLNKFKKLAQLDLIGLSRITKLDRSVLPANMKPGKDTLETVLETYKKDNKEEPATIPPVSLKVSGLTGLKELDLSGFDRETLAGLDAATLTSLEKVDISGNKLDLAPGTENRQIFDTMLSTISNHVGSNEQTVKFDKQKPTGHYPDTYGKTSLRLPVANEKVDLQSQLLFGTVTNQGTLINSEADYKAYQNHKIAGRSFVDSNYHYNNFKVSYENYTVKVTDSTLGTTTDKTLATDKEETYKVDFFSPADKTKAVHTAKVIVGDEKTMMVNLAEGATVIGGSADPVNARKVFDGQLGSETDNISLGWDSKQSIIFKLKEDGLIKHWRFFNDSARNPETTNKPIQEASLQIFNIKDYNLDNLLENPNKFDDEKYWITVDTYSAQGERATAFSNTLNNITSKYWRVVFDTKGDRYSSPVVPELQILGYPLPNADTIMKTVTTAKELSQQKDKFSQKMLDELKIKEMALETSLNSKIFDVTAINANAGVLKDCIEKRQLLKKGSGAQYQANWQSLDQRPTPAWFEDAKFGIFIHWGLYSVPSWATKSNADGFGSGYSEWYWQRLFAKNLKIHPEFVEFHKKNFGDKNYQDFVQNFKAELFQPNDWANIFEQAGAKYVVLTSKHHEGFTLWPSKESWNWNSVDVGPHRDLAGDLMTAVRAKNLKMGYYYSLYEWFNPVYKADVNTYVSERMLPQMKDLVTRYKPDILWTDGEWDYPAKTWRSEEFLAWLFNESNVKNEIVVNDRWGSDTKSKHGSFATSEYGHGGTDNTETTGGFQRPWEECRGMGESFGYNRNENLDSYQTGEALVHQLIDIVAKGGNLLLNIGPAADGTIPVIMQERLHEIGSWLKVNGSAIYGTRRWSKAPAYTKESTLYFTQKGKNLNAITRKWEETISIQNVAKPSKVTLLGYKGEVKFTYKNGTLTIMAPSVNPSNIPCQYAWTYEIENALGTWSHPQFEK

SEQ ID NO: 149 - DNA, 3849 bp, Artificial Sequence
  SYNTHETIC FUSION PROTEN
atgggcagcagccatcatcatcatcatcacagcagcggcctggtgccgcgcggcagccatatggaggagaagactgttcaaacaggaaagacagatcagcaggttggtgctaaattggtacaggaaatccgtgaaggaaaacgcggaccactatatgctggttattttaggacatggcatgatcgtgcttcaacaggaatagatggtaaacagcaacatccagaaaatactatggctgaggtcccaaaagaagttgatatcttatttgtttttcatgaccatacagcttcagatagtccattttggtctgaattaaaggacagttatgtccataaattacatcaacagggaacggcacttgttcagacaattggtgttaacgaattaaatggacgtacaggtttatctaaagattatcctgatactcctgaggggaacaaagctttagcagcagccattgtcaaggcatttgtaactgatcgtggtgtcgatggactagatattgatattgagcacgaatttacgaacaaaagaacacctgaagaagatgctcgtgctctaaatgtttttaaagagattgcgcagttaataggtaaaaatggtagtgataaatctaaattgctcatcatggacactaccctaagtgttgaaaataatccaatatttaaagggatagcggaagatcttgattatcttcttagacaatattatggttcacaaggtggagaagctgaagtggatactataaactctgattggaaccaatatcagaattatattgatgctagccagttcatgattggattctccttttttgaagaatctgcgtccaaagggaatttatggtttgatgttaacgaatacgaccctaacaatcctgaaaaagggaaagatattgaaggaacacgtgctaaaaaatatgcagagtggcaacctagtacaggtggtttaaaagcaggtatattctcttatgctattgatcgtgatggagtggctcatgttccttcaacatataaaaataggactagtacaaatttacaacggcatgaagtcgataatatctcacatactgactacaccgtatctcgaaaattaaaaacattgatgaccgaagacaaacgctatgatgtcattgatcaaaaagacattcctgacccagcattaagagaacaaatcattcaacaagttggacagtataaaggcgatttggaacgttataacaagacattggtgcttacaggagataagattcaaaatcttaaaggactagaaaaattaagcaagttacaaaaattagagttgcgccagctatctaacgttaaagaaattactccagaacttttgccggaaagcatgaaaaaagatgctgagcttgttatggtaggcatgactggtttagaaaaactaaaccttagtggtctaaatcgtcaaactttagacggtatagacgtgaatagtattacgcatttgacatcatttgatatttcacataatagtttggacttgtcggaaaagagtgaagaccgtaaactattaatgactttgatggagcaggtttcaaatcatcaaaaaataacggtgaaaaatacggcttttgaaaatcaaaaaccgaaaggttattatcctcagacgtatgataccaaagaaggtcattatgatgttgataatgcagaacatgatattttaactgattttgtttttggaactgttactaaacgtaatacctttattggagacgaagaagcatttgctatctataaagaaggagctgtcgatggtcgacaatatgtgtctaaagactatacttatgaagcttttcgtaaagactataaaggttacaaggttcatttaactgcttctaacctaggagaaacagttacttctaaggtaactgctactactgatgaaacttacttagtagatgtttctgatggggaaaaagttgttcaccacatgaaactcaatataggatctggtgccatcatgatggaaaatctggcaaaaggggctaaagtgattggtacatctggggactttgagcaagcaaagaagattttcgatggtgaaaagtcagatagattcttcacttggggacaaactaactggatagcttttgatctaggagaaattaatcttgcgaaggaatggcgtttatttaatgcagagacaaatactgaaataaagacagatagtagcttaaacgtggctaaaggacgtcttcagattttaaaagatacaactattgatttagaaaaaatggacataaaaaatcgtaaagagtatctgtcgaatgatgaaaattggactgatgttgctcagatggatgatgcaaaagcgatatttaatagtaaattatccaatgttttatctcggtattggcggttttgtgtagatggtggagctagctcttattaccctcaatataccgaacttcaaatcctcggacaacgtttatcaaatgatgtcgctaatacgctgaaggatggatccggtgctcagtatcaggcaaattggcagagtctggatcagcgcccgaccccggcatggtttgaagatgccaaatttggcatttttatccattggggcctgtatagtgtgccgagctgggcaaccaaaagtaatgccgatggctttggtagcggctatagtgaatggtattggcagcgtctgtttgcaaaaaatctgaaaattcatccggaatttgtggaatttcataaaaaaaacttcggcgataagaactatcaggattttgtgcagaattttaaggcagaactgtttcagccgaatgattgggcaaatatttttgaacaggcaggcgccaaatatgttgtgctgaccagtaaacatcatgaaggttttaccctgtggccgagcaaagaaagctggaattggaatagtgttgatgtgggcccgcatcgtgatctggcaggtgatctgatgaccgccgtgcgtgcaaaaaatttaaaaatgggttattactacagcctgtatgaatggtttaatccggtttataaagccgatgtgaatacctatgttagcgaacgtatgctgccgcagatgaaagatctggttacccgctataaaccggatattctgtggaccgatggcgaatgggattatccggcaaaaacctggcgtagcgaagaatttctggcatggctgtttaatgaaagtaatgttaaaaacgagatcgtggttaatgatcgttggggtagtgataccaaaagcaaacatggtagctttgccaccagtgaatatggccacggtggtaccgataataccgaaaccaccggtggctttcagcgtccgtgggaagaatgccgtggtatgggtgaaagttttggctataatcgtaatgaaaacctggatagctatcagaccggcgaagcactggtgcatcagctgattgatattgttgccaaaggcggtaatctgctgctgaatattggcccggcagccgatggcaccattccggttattatgcaggaacgcctgcatgaaattggcagctggctgaaagttaatggcagcgcaatttatggcacccgtcgctggagcaaagcaccggcatataccaaagaaagtaccctgtattttacccagaaaggtaaaaatctgaacgcaattacccgcaaatgggaagaaaccattagcattcagaatgtggcaaaaccgagtaaagttaccctgctgggttataaaggtgaagttaaatttacctacaagaacggtaccctgaccattatggccccgagcgtgaatccgagcaatattccgtgtcagtatgcctggacctatgaaattgaaaatgcactgagtacctggtctcatccgcagttcgagaaataa

SEQ ID NO: 150 - protein, 1282 aa, Artificial Sequence
  SYNTHETIC FUSION PROTEN
MGSSHHHHHHSSGLVPRGSHMEEKTVQTGKTDQQVGAKLVQEIREGKRGPLYAGYFRTWHDRASTGIDGKQQHPENTMAEVPKEVDILFVFHDHTASDSPFWSELKDSYVHKLHQQGTALVQTIGVNELNGRTGLSKDYPDTPEGNKALAAAIVKAFVTDRGVDGLDIDIEHEFTNKRTPEEDARALNVFKEIAQLIGKNGSDKSKLLIMDTTLSVENNPIFKGIAEDLDYLLRQYYGSQGGEAEVDTINSDWNQYQNYIDASQFMIGFSFFEESASKGNLWFDVNEYDPNNPEKGKDIEGTRAKKYAEWQPSTGGLKAGIFSYAIDRDGVAHVPSTYKNRTSTNLQRHEVDNISHTDYTVSRKLKTLMTEDKRYDVIDQKDIPDPALREQIIQQVGQYKGDLERYNKTLVLTGDKIQNLKGLEKLSKLQKLELRQLSNVKEITPELLPESMKKDAELVMVGMTGLEKLNLSGLNRQTLDGIDVNSITHLTSFDISHNSLDLSEKSEDRKLLMTLMEQVSNHQKITVKNTAFENQKPKGYYPQTYDTKEGHYDVDNAEHDILTDFVFGTVTKRNTFIGDEEAFAIYKEGAVDGRQYVSKDYTYEAFRKDYKGYKVHLTASNLGETVTSKVTATTDETYLVDVSDGEKVVHHMKLNIGSGAIMMENLAKGAKVIGTSGDFEQAKKIFDGEKSDRFFTWGQTNWIAFDLGEINLAKEWRLFNAETNTEIKTDSSLNVAKGRLQILKDTTIDLEKMDIKNRKEYLSNDENWTDVAQMDDAKAIFNSKLSNVLSRYWRFCVDGGASSYYPQYTELQILGQRLSNDVANTLKDGSGAQYQANWQSLDQRPTPAWFEDAKFGIFIHWGLYSVPSWATKSNADGFGSGYSEWYWQRLFAKNLKIHPEFVEFHKKNFGDKNYQDFVQNFKAELFQPNDWANIFEQAGAKYVVLTSKHHEGFTLWPSKESWNWNSVDVGPHRDLAGDLMTAVRAKNLKMGYYYSLYEWFNPVYKADVNTYVSERMLPQMKDLVTRYKPDILWTDGEWDYPAKTWRSEEFLAWLFNESNVKNEIVVNDRWGSDTKSKHGSFATSEYGHGGTDNTETTGGFQRPWEECRGMGESFGYNRNENLDSYQTGEALVHQLIDIVAKGGNLLLNIGPAADGTIPVIMQERLHEIGSWLKVNGSAIYGTRRWSKAPAYTKESTLYFTQKGKNLNAITRKWEETISIQNVAKPSKVTLLGYKGEVKFTYKNGTLTIMAPSVNPSNIPCQYAWTYEIENALSTWSHPQFEK

SEQ ID NO: 151 - DNA, 3849 bp, Artificial Sequence
  SYNTHETIC FUSION PROTEN
atgggcagcagccatcatcatcatcatcacagcagcggcctggtgccgcgcggcagccatatggaggagaagactgttcaaacaggaaagacagatcagcaggttggtgctaaattggtacaggaaatccgtgaaggaaaacgcggaccactatatgctggttattttaggacatggcatgatcgtgcttcaacaggaatagatggtaaacagcaacatccagaaaatactatggctgaggtcccaaaagaagttgatatcttatttgtttttcatgaccatacagcttcagatagtccattttggtctgaattaaaggacagttatgtccataaattacatcaacagggaacggcacttgttcaggaaattggtgttaacgaattaaatggacgtacaggtttatctaaagattatcctgatactcctgaggggaacaaagctttagcagcagccattgtcaaggcatttgtaactgatcgtggtgtcgatggactagatattgatattgagcacgaatttacgaacaaaagaacacctgaagaagatgctcgtgctctaaatgtttttaaagagattgcgcagttaataggtaaaaatggtagtgataaatctaaattgctcatcatggacactaccctaagtgttgaaaataatccaatatttaaagggatagcggaagatcttgattatcttcttagacaatattatggttcacaaggtggagaagctgaagtggatactataaactctgattggaaccaatatcagaattatattgatgctagccagttcatgattggattctccttttttgaagaatctgcgtccaaagggaatttatggtttgatgttaacgaatacgaccctaacaatcctgaaaaagggaaagatattgaaggaacacgtgctaaaaaatatgcagagtggcaacctagtacaggtggtttaaaagcaggtatattctcttatgctattgatcgtgatggagtggctcatgttccttcaacatataaaaataggactagtacaaatttacaacggcatgaagtcgataatatctcacatactgactacaccgtatctcgaaaattaaaaacattgatgaccgaagacaaacgctatgatgtcattgatcaaaaagacattcctgacccagcattaagagaacaaatcattcaacaagttggacagtataaaggcgatttggaacgttataacaagacattggtgcttacaggagataagattcaaaatcttaaaggactagaaaaattaagcaagttacaaaaattagagttgcgccagctatctaacgttaaagaaattactccagaacttttgccggaaagcatgaaaaaagatgctgagcttgttatggtaggcatgactggtttagaaaaactaaaccttagtggtctaaatcgtcaaactttagacggtatagacgtgaatagtattacgcatttgacatcatttgatatttcacataatagtttggacttgtcggaaaagagtgaagaccgtaaactattaatgactttgatggagcaggtttcaaatcatcaaaaaataacggtgaaaaatacggcttttgaaaatcaaaaaccgaaaggttattatcctcagacgtatgataccaaagaaggtcattatgatgttgataatgcagaacatgatattttaactgattttgtttttggaactgttactaaacgtaatacctttattggagacgaagaagcatttgctatctataaagaaggagctgtcgatggtcgacaatatgtgtctaaagactatacttatgaagcttttcgtaaagactataaaggttacaaggttcatttaactgcttctaacctaggagaaacagttacttctaaggtaactgctactactgatgaaacttacttagtagatgtttctgatggggaaaaagttgttcaccacatgaaactcaatataggatctggtgccatcatgatggaaaatctggcaaaaggggctaaagtgattggtacatctggggactttgagcaagcaaagaagattttcgatggtgaaaagtcagatagattcttcacttggggacaaactaactggatagcttttgatctaggagaaattaatcttgcgaaggaatggcgtttatttaatgcagagacaaatactgaaataaagacagatagtagcttaaacgtggctaaaggacgtcttcagattttaaaagatacaactattgatttagaaaaaatggacataaaaaatcgtaaagagtatctgtcgaatgatgaaaattggactgatgttgctcagatggatgatgcaaaagcgatatttaatagtaaattatccaatgttttatctcggtattggcggttttgtgtagatggtggagctagctcttattaccctcaatataccgaacttcaaatcctcggacaacgtttatcaaatgatgtcgctaatacgctgaaggatggatccggtgctcagtatcaggcaaattggcagagtctggatcagcgcccgaccccggcatggtttgaagatgccaaatttggcatttttatccattggggcctgtatagtgtgccgagctgggcaaccaaaagtaatgccgatggctttggtagcggctatagtgaatggtattggcagcgtctgtttgcaaaaaatctgaaaattcatccggaatttgtggaatttcataaaaaaaacttcggcgataagaactatcaggattttgtgcagaattttaaggcagaactgtttcagccgaatgattgggcaaatatttttgaacaggcaggcgccaaatatgttgtgctgaccagtaaacatcatgaaggttttaccctgtggccgagcaaagaaagctggaattggaatagtgttgatgtgggcccgcatcgtgatctggcaggtgatctgatgaccgccgtgcgtgcaaaaaatttaaaaatgggttattactacagcctgtatgaatggtttaatccggtttataaagccgatgtgaatacctatgttagcgaacgtatgctgccgcagatgaaagatctggttacccgctataaaccggatattctgtggaccgatggcgaatgggattatccggcaaaaacctggcgtagcgaagaatttctggcatggctgtttaatgaaagtaatgttaaaaacgagatcgtggttaatgatcgttggggtagtgataccaaaagcaaacatggtagctttgccaccagtgaatatggccacggtggtaccgataataccgaaaccaccggtggctttcagcgtccgtgggaagaatgccgtggtatgggtgaaagttttggctataatcgtaatgaaaacctggatagctatcagaccggcgaagcactggtgcatcagctgattgatattgttgccaaaggcggtaatctgctgctgaatattggcccggcagccgatggcaccattccggttattatgcaggaacgcctgcatgaaattggcagctggctgaaagttaatggcagcgcaatttatggcacccgtcgctggagcaaagcaccggcatataccaaagaaagtaccctgtattttacccagaaaggtaaaaatctgaacgcaattacccgcaaatgggaagaaaccattagcattcagaatgtggcaaaaccgagtaaagttaccctgctgggttataaaggtgaagttaaatttacctacaagaacggtaccctgaccattatggccccgagcgtgaatccgagcaatattccgtgtcagtatgcctggacctatgaaattgaaaatgcactgagtacctggtctcatccgcagttcgagaaataa

SEQ ID NO: 152 - protein, 1282 aa, Artificial Sequence
  SYNTHETIC FUSION PROTEN
MGSSHHHHHHSSGLVPRGSHMEEKTVQTGKTDQQVGAKLVQEIREGKRGPLYAGYFRTWHDRASTGIDGKQQHPENTMAEVPKEVDILFVFHDHTASDSPFWSELKDSYVHKLHQQGTALVQEIGVNELNGRTGLSKDYPDTPEGNKALAAAIVKAFVTDRGVDGLDIDIEHEFTNKRTPEEDARALNVFKEIAQLIGKNGSDKSKLLIMDTTLSVENNPIFKGIAEDLDYLLRQYYGSQGGEAEVDTINSDWNQYQNYIDASQFMIGFSFFEESASKGNLWFDVNEYDPNNPEKGKDIEGTRAKKYAEWQPSTGGLKAGIFSYAIDRDGVAHVPSTYKNRTSTNLQRHEVDNISHTDYTVSRKLKTLMTEDKRYDVIDQKDIPDPALREQIIQQVGQYKGDLERYNKTLVLTGDKIQNLKGLEKLSKLQKLELRQLSNVKEITPELLPESMKKDAELVMVGMTGLEKLNLSGLNRQTLDGIDVNSITHLTSFDISHNSLDLSEKSEDRKLLMTLMEQVSNHQKITVKNTAFENQKPKGYYPQTYDTKEGHYDVDNAEHDILTDFVFGTVTKRNTFIGDEEAFAIYKEGAVDGRQYVSKDYTYEAFRKDYKGYKVHLTASNLGETVTSKVTATTDETYLVDVSDGEKVVHHMKLNIGSGAIMMENLAKGAKVIGTSGDFEQAKKIFDGEKSDRFFTWGQTNWIAFDLGEINLAKEWRLFNAETNTEIKTDSSLNVAKGRLQILKDTTIDLEKMDIKNRKEYLSNDENWTDVAQMDDAKAIFNSKLSNVLSRYWRFCVDGGASSYYPQYTELQILGQRLSNDVANTLKDGSGAQYQANWQSLDQRPTPAWFEDAKFGIFIHWGLYSVPSWATKSNADGFGSGYSEWYWQRLFAKNLKIHPEFVEFHKKNFGDKNYQDFVQNFKAELFQPNDWANIFEQAGAKYVVLTSKHHEGFTLWPSKESWNWNSVDVGPHRDLAGDLMTAVRAKNLKMGYYYSLYEWFNPVYKADVNTYVSERMLPQMKDLVTRYKPDILWTDGEWDYPAKTWRSEEFLAWLFNESNVKNEIVVNDRWGSDTKSKHGSFATSEYGHGGTDNTETTGGFQRPWEECRGMGESFGYNRNENLDSYQTGEALVHQLIDIVAKGGNLLLNIGPAADGTIPVIMQERLHEIGSWLKVNGSAIYGTRRWSKAPAYTKESTLYFTQKGKNLNAITRKWEETISIQNVAKPSKVTLLGYKGEVKFTYKNGTLTIMAPSVNPSNIPCQYAWTYEIENALSTWSHPQFEK

SEQ ID NO: 153 - DNA, 3849 bp, Artificial Sequence
  SYNTHETIC FUSION PROTEN
atgggcagcagccatcatcatcatcatcacagcagcggcctggtgccgcgcggcagccatatggaggagaagactgttcaaacaggaaagacagatcagcaggttggtgctaaattggtacaggaaatccgtgaaggaaaacgcggaccactatatgctggttattttaggacatggcatgatcgtgcttcaacaggaatagatggtaaacagcaacatccagaaaatactatggctgaggtcccaaaagaagttgatatcttatttgtttttcatgaccatacagcttcagatagtccattttggtctgaattaaaggacagttatgtccataaattacatcaacagggaacggcacttgttcagatgattggtgttaacgaattaaatggacgtacaggtttatctaaagattatcctgatactcctgaggggaacaaagctttagcagcagccattgtcaaggcatttgtaactgatcgtggtgtcgatggactagatattgatattgagcacgaatttacgaacaaaagaacacctgaagaagatgctcgtgctctaaatgtttttaaagagattgcgcagttaataggtaaaaatggtagtgataaatctaaattgctcatcatggacactaccctaagtgttgaaaataatccaatatttaaagggatagcggaagatcttgattatcttcttagacaatattatggttcacaaggtggagaagctgaagtggatactataaactctgattggaaccaatatcagaattatattgatgctagccagttcatgattggattctccttttttgaagaatctgcgtccaaagggaatttatggtttgatgttaacgaatacgaccctaacaatcctgaaaaagggaaagatattgaaggaacacgtgctaaaaaatatgcagagtggcaacctagtacaggtggtttaaaagcaggtatattctcttatgctattgatcgtgatggagtggctcatgttccttcaacatataaaaataggactagtacaaatttacaacggcatgaagtcgataatatctcacatactgactacaccgtatctcgaaaattaaaaacattgatgaccgaagacaaacgctatgatgtcattgatcaaaaagacattcctgacccagcattaagagaacaaatcattcaacaagttggacagtataaaggcgatttggaacgttataacaagacattggtgcttacaggagataagattcaaaatcttaaaggactagaaaaattaagcaagttacaaaaattagagttgcgccagctatctaacgttaaagaaattactccagaacttttgccggaaagcatgaaaaaagatgctgagcttgttatggtaggcatgactggtttagaaaaactaaaccttagtggtctaaatcgtcaaactttagacggtatagacgtgaatagtattacgcatttgacatcatttgatatttcacataatagtttggacttgtcggaaaagagtgaagaccgtaaactattaatgactttgatggagcaggtttcaaatcatcaaaaaataacggtgaaaaatacggcttttgaaaatcaaaaaccgaaaggttattatcctcagacgtatgataccaaagaaggtcattatgatgttgataatgcagaacatgatattttaactgattttgtttttggaactgttactaaacgtaatacctttattggagacgaagaagcatttgctatctataaagaaggagctgtcgatggtcgacaatatgtgtctaaagactatacttatgaagcttttcgtaaagactataaaggttacaaggttcatttaactgcttctaacctaggagaaacagttacttctaaggtaactgctactactgatgaaacttacttagtagatgtttctgatggggaaaaagttgttcaccacatgaaactcaatataggatctggtgccatcatgatggaaaatctggcaaaaggggctaaagtgattggtacatctggggactttgagcaagcaaagaagattttcgatggtgaaaagtcagatagattcttcacttggggacaaactaactggatagcttttgatctaggagaaattaatcttgcgaaggaatggcgtttatttaatgcagagacaaatactgaaataaagacagatagtagcttaaacgtggctaaaggacgtcttcagattttaaaagatacaactattgatttagaaaaaatggacataaaaaatcgtaaagagtatctgtcgaatgatgaaaattggactgatgttgctcagatggatgatgcaaaagcgatatttaatagtaaattatccaatgttttatctcggtattggcggttttgtgtagatggtggagctagctcttattaccctcaatataccgaacttcaaatcctcggacaacgtttatcaaatgatgtcgctaatacgctgaaggatggatccggtgctcagtatcaggcaaattggcagagtctggatcagcgcccgaccccggcatggtttgaagatgccaaatttggcatttttatccattggggcctgtatagtgtgccgagctgggcaaccaaaagtaatgccgatggctttggtagcggctatagtgaatggtattggcagcgtctgtttgcaaaaaatctgaaaattcatccggaatttgtggaatttcataaaaaaaacttcggcgataagaactatcaggattttgtgcagaattttaaggcagaactgtttcagccgaatgattgggcaaatatttttgaacaggcaggcgccaaatatgttgtgctgaccagtaaacatcatgaaggttttaccctgtggccgagcaaagaaagctggaattggaatagtgttgatgtgggcccgcatcgtgatctggcaggtgatctgatgaccgccgtgcgtgcaaaaaatttaaaaatgggttattactacagcctgtatgaatggtttaatccggtttataaagccgatgtgaatacctatgttagcgaacgtatgctgccgcagatgaaagatctggttacccgctataaaccggatattctgtggaccgatggcgaatgggattatccggcaaaaacctggcgtagcgaagaatttctggcatggctgtttaatgaaagtaatgttaaaaacgagatcgtggttaatgatcgttggggtagtgataccaaaagcaaacatggtagctttgccaccagtgaatatggccacggtggtaccgataataccgaaaccaccggtggctttcagcgtccgtgggaagaatgccgtggtatgggtgaaagttttggctataatcgtaatgaaaacctggatagctatcagaccggcgaagcactggtgcatcagctgattgatattgttgccaaaggcggtaatctgctgctgaatattggcccggcagccgatggcaccattccggttattatgcaggaacgcctgcatgaaattggcagctggctgaaagttaatggcagcgcaatttatggcacccgtcgctggagcaaagcaccggcatataccaaagaaagtaccctgtattttacccagaaaggtaaaaatctgaacgcaattacccgcaaatgggaagaaaccattagcattcagaatgtggcaaaaccgagtaaagttaccctgctgggttataaaggtgaagttaaatttacctacaagaacggtaccctgaccattatggccccgagcgtgaatccgagcaatattccgtgtcagtatgcctggacctatgaaattgaaaatgcactgagtacctggtctcatccgcagttcgagaaataa

SEQ ID NO: 154 - protein, 1282 aa, Artificial Sequence
  SYNTHETIC FUSION PROTEN
MGSSHHHHHHSSGLVPRGSHMEEKTVQTGKTDQQVGAKLVQEIREGKRGPLYAGYFRTWHDRASTGIDGKQQHPENTMAEVPKEVDILFVFHDHTASDSPFWSELKDSYVHKLHQQGTALVQMIGVNELNGRTGLSKDYPDTPEGNKALAAAIVKAFVTDRGVDGLDIDIEHEFTNKRTPEEDARALNVFKEIAQLIGKNGSDKSKLLIMDTTLSVENNPIFKGIAEDLDYLLRQYYGSQGGEAEVDTINSDWNQYQNYIDASQFMIGFSFFEESASKGNLWFDVNEYDPNNPEKGKDIEGTRAKKYAEWQPSTGGLKAGIFSYAIDRDGVAHVPSTYKNRTSTNLQRHEVDNISHTDYTVSRKLKTLMTEDKRYDVIDQKDIPDPALREQIIQQVGQYKGDLERYNKTLVLTGDKIQNLKGLEKLSKLQKLELRQLSNVKEITPELLPESMKKDAELVMVGMTGLEKLNLSGLNRQTLDGIDVNSITHLTSFDISHNSLDLSEKSEDRKLLMTLMEQVSNHQKITVKNTAFENQKPKGYYPQTYDTKEGHYDVDNAEHDILTDFVFGTVTKRNTFIGDEEAFAIYKEGAVDGRQYVSKDYTYEAFRKDYKGYKVHLTASNLGETVTSKVTATTDETYLVDVSDGEKVVHHMKLNIGSGAIMMENLAKGAKVIGTSGDFEQAKKIFDGEKSDRFFTWGQTNWIAFDLGEINLAKEWRLFNAETNTEIKTDSSLNVAKGRLQILKDTTIDLEKMDIKNRKEYLSNDENWTDVAQMDDAKAIFNSKLSNVLSRYWRFCVDGGASSYYPQYTELQILGQRLSNDVANTLKDGSGAQYQANWQSLDQRPTPAWFEDAKFGIFIHWGLYSVPSWATKSNADGFGSGYSEWYWQRLFAKNLKIHPEFVEFHKKNFGDKNYQDFVQNFKAELFQPNDWANIFEQAGAKYVVLTSKHHEGFTLWPSKESWNWNSVDVGPHRDLAGDLMTAVRAKNLKMGYYYSLYEWFNPVYKADVNTYVSERMLPQMKDLVTRYKPDILWTDGEWDYPAKTWRSEEFLAWLFNESNVKNEIVVNDRWGSDTKSKHGSFATSEYGHGGTDNTETTGGFQRPWEECRGMGESFGYNRNENLDSYQTGEALVHQLIDIVAKGGNLLLNIGPAADGTIPVIMQERLHEIGSWLKVNGSAIYGTRRWSKAPAYTKESTLYFTQKGKNLNAITRKWEETISIQNVAKPSKVTLLGYKGEVKFTYKNGTLTIMAPSVNPSNIPCQYAWTYEIENALSTWSHPQFEK

SEQ ID NO: 155 - DNA, 3849 bp, Artificial Sequence
  SYNTHETIC FUSION PROTEN
atgggcagcagccatcatcatcatcatcacagcagcggcctggtgccgcgcggcagccatatggaggagaagactgttcaaacaggaaagacagatcagcaggttggtgctaaattggtacaggaaatccgtgaaggaaaacgcggaccactatatgctggttattttaggacatggcatgatcgtgcttcaacaggaatagatggtaaacagcaacatccagaaaatactatggctgaggtcccaaaagaagttgatatcttatttgtttttcatgaccatacagcttcagatagtccattttggtctgaattaaaggacagttatgtccataaattacatcaacagggaacggcacttgttcagacaattggtgttaacgaattaaatggacgtacaggtttatctaaagattatcctgatactcctgaggggaacaaagctttagcagcagccattgtcaaggcatttgtaactgatcgtggtgtcgatggactagatattatgattgagcacgaatttacgaacaaaagaacacctgaagaagatgctcgtgctctaaatgtttttaaagagattgcgcagttaataggtaaaaatggtagtgataaatctaaattgctcatcatggacactaccctaagtgttgaaaataatccaatatttaaagggatagcggaagatcttgattatcttcttagacaatattatggttcacaaggtggagaagctgaagtggatactataaactctgattggaaccaatatcagaattatattgatgctagccagttcatgattggattctccttttttgaagaatctgcgtccaaagggaatttatggtttgatgttaacgaatacgaccctaacaatcctgaaaaagggaaagatattgaaggaacacgtgctaaaaaatatgcagagtggcaacctagtacaggtggtttaaaagcaggtatattctcttatgctattgatcgtgatggagtggctcatgttccttcaacatataaaaataggactagtacaaatttacaacggcatgaagtcgataatatctcacatactgactacaccgtatctcgaaaattaaaaacattgatgaccgaagacaaacgctatgatgtcattgatcaaaaagacattcctgacccagcattaagagaacaaatcattcaacaagttggacagtataaaggcgatttggaacgttataacaagacattggtgcttacaggagataagattcaaaatcttaaaggactagaaaaattaagcaagttacaaaaattagagttgcgccagctatctaacgttaaagaaattactccagaacttttgccggaaagcatgaaaaaagatgctgagcttgttatggtaggcatgactggtttagaaaaactaaaccttagtggtctaaatcgtcaaactttagacggtatagacgtgaatagtattacgcatttgacatcatttgatatttcacataatagtttggacttgtcggaaaagagtgaagaccgtaaactattaatgactttgatggagcaggtttcaaatcatcaaaaaataacggtgaaaaatacggcttttgaaaatcaaaaaccgaaaggttattatcctcagacgtatgataccaaagaaggtcattatgatgttgataatgcagaacatgatattttaactgattttgtttttggaactgttactaaacgtaatacctttattggagacgaagaagcatttgctatctataaagaaggagctgtcgatggtcgacaatatgtgtctaaagactatacttatgaagcttttcgtaaagactataaaggttacaaggttcatttaactgcttctaacctaggagaaacagttacttctaaggtaactgctactactgatgaaacttacttagtagatgtttctgatggggaaaaagttgttcaccacatgaaactcaatataggatctggtgccatcatgatggaaaatctggcaaaaggggctaaagtgattggtacatctggggactttgagcaagcaaagaagattttcgatggtgaaaagtcagatagattcttcacttggggacaaactaactggatagcttttgatctaggagaaattaatcttgcgaaggaatggcgtttatttaatgcagagacaaatactgaaataaagacagatagtagcttaaacgtggctaaaggacgtcttcagattttaaaagatacaactattgatttagaaaaaatggacataaaaaatcgtaaagagtatctgtcgaatgatgaaaattggactgatgttgctcagatggatgatgcaaaagcgatatttaatagtaaattatccaatgttttatctcggtattggcggttttgtgtagatggtggagctagctcttattaccctcaatataccgaacttcaaatcctcggacaacgtttatcaaatgatgtcgctaatacgctgaaggatggatccggtgctcagtatcaggcaaattggcagagtctggatcagcgcccgaccccggcatggtttgaagatgccaaatttggcatttttatccattggggcctgtatagtgtgccgagctgggcaaccaaaagtaatgccgatggctttggtagcggctatagtgaatggtattggcagcgtctgtttgcaaaaaatctgaaaattcatccggaatttgtggaatttcataaaaaaaacttcggcgataagaactatcaggattttgtgcagaattttaaggcagaactgtttcagccgaatgattgggcaaatatttttgaacaggcaggcgccaaatatgttgtgctgaccagtaaacatcatgaaggttttaccctgtggccgagcaaagaaagctggaattggaatagtgttgatgtgggcccgcatcgtgatctggcaggtgatctgatgaccgccgtgcgtgcaaaaaatttaaaaatgggttattactacagcctgtatgaatggtttaatccggtttataaagccgatgtgaatacctatgttagcgaacgtatgctgccgcagatgaaagatctggttacccgctataaaccggatattctgtggaccgatggcgaatgggattatccggcaaaaacctggcgtagcgaagaatttctggcatggctgtttaatgaaagtaatgttaaaaacgagatcgtggttaatgatcgttggggtagtgataccaaaagcaaacatggtagctttgccaccagtgaatatggccacggtggtaccgataataccgaaaccaccggtggctttcagcgtccgtgggaagaatgccgtggtatgggtgaaagttttggctataatcgtaatgaaaacctggatagctatcagaccggcgaagcactggtgcatcagctgattgatattgttgccaaaggcggtaatctgctgctgaatattggcccggcagccgatggcaccattccggttattatgcaggaacgcctgcatgaaattggcagctggctgaaagttaatggcagcgcaatttatggcacccgtcgctggagcaaagcaccggcatataccaaagaaagtaccctgtattttacccagaaaggtaaaaatctgaacgcaattacccgcaaatgggaagaaaccattagcattcagaatgtggcaaaaccgagtaaagttaccctgctgggttataaaggtgaagttaaatttacctacaagaacggtaccctgaccattatggccccgagcgtgaatccgagcaatattccgtgtcagtatgcctggacctatgaaattgaaaatgcactgagtacctggtctcatccgcagttcgagaaataa

SEQ ID NO: 156 - protein, 1282 aa, Artificial Sequence
  SYNTHETIC FUSION PROTEN
MGSSHHHHHHSSGLVPRGSHMEEKTVQTGKTDQQVGAKLVQEIREGKRGPLYAGYFRTWHDRASTGIDGKQQHPENTMAEVPKEVDILFVFHDHTASDSPFWSELKDSYVHKLHQQGTALVQTIGVNELNGRTGLSKDYPDTPEGNKALAAAIVKAFVTDRGVDGLDIMIEHEFTNKRTPEEDARALNVFKEIAQLIGKNGSDKSKLLIMDTTLSVENNPIFKGIAEDLDYLLRQYYGSQGGEAEVDTINSDWNQYQNYIDASQFMIGFSFFEESASKGNLWFDVNEYDPNNPEKGKDIEGTRAKKYAEWQPSTGGLKAGIFSYAIDRDGVAHVPSTYKNRTSTNLQRHEVDNISHTDYTVSRKLKTLMTEDKRYDVIDQKDIPDPALREQIIQQVGQYKGDLERYNKTLVLTGDKIQNLKGLEKLSKLQKLELRQLSNVKEITPELLPESMKKDAELVMVGMTGLEKLNLSGLNRQTLDGIDVNSITHLTSFDISHNSLDLSEKSEDRKLLMTLMEQVSNHQKITVKNTAFENQKPKGYYPQTYDTKEGHYDVDNAEHDILTDFVFGTVTKRNTFIGDEEAFAIYKEGAVDGRQYVSKDYTYEAFRKDYKGYKVHLTASNLGETVTSKVTATTDETYLVDVSDGEKVVHHMKLNIGSGAIMMENLAKGAKVIGTSGDFEQAKKIFDGEKSDRFFTWGQTNWIAFDLGEINLAKEWRLFNAETNTEIKTDSSLNVAKGRLQILKDTTIDLEKMDIKNRKEYLSNDENWTDVAQMDDAKAIFNSKLSNVLSRYWRFCVDGGASSYYPQYTELQILGQRLSNDVANTLKDGSGAQYQANWQSLDQRPTPAWFEDAKFGIFIHWGLYSVPSWATKSNADGFGSGYSEWYWQRLFAKNLKIHPEFVEFHKKNFGDKNYQDFVQNFKAELFQPNDWANIFEQAGAKYVVLTSKHHEGFTLWPSKESWNWNSVDVGPHRDLAGDLMTAVRAKNLKMGYYYSLYEWFNPVYKADVNTYVSERMLPQMKDLVTRYKPDILWTDGEWDYPAKTWRSEEFLAWLFNESNVKNEIVVNDRWGSDTKSKHGSFATSEYGHGGTDNTETTGGFQRPWEECRGMGESFGYNRNENLDSYQTGEALVHQLIDIVAKGGNLLLNIGPAADGTIPVIMQERLHEIGSWLKVNGSAIYGTRRWSKAPAYTKESTLYFTQKGKNLNAITRKWEETISIQNVAKPSKVTLLGYKGEVKFTYKNGTLTIMAPSVNPSNIPCQYAWTYEIENALSTWSHPQFEK

SEQ ID NO: 157 - DNA, 3042 bp, Artificial Sequence
  SYNTHETIC FUSION PROTEN
atgggcagcagccatcatcatcatcatcacagcagcggcctggtgccgcgcggcagccatatgcagtatcaggcaaattggcagagtctggatcagcgcccgaccccggcatggtttgaagatgccaaatttggcatttttatccattggggcctgtatagtgtgccgagctgggcaaccaaaagtaatgccgatggctttggtagcggctatagtgaatggtattggcagcgtctgtttgcaaaaaatctgaaaattcatccggaatttgtggaatttcataaaaaaaacttcggcgataagaactatcaggattttgtgcagaattttaaggcagaactgtttcagccgaatgattgggcaaatatttttgaacaggcaggcgccaaatatgttgtgctgaccagtaaacatcatgaaggttttaccctgtggccgagcaaagaaagctggaattggaatagtgttgatgtgggcccgcatcgtgatctggcaggtgatctgatgaccgccgtgcgtgcaaaaaatttaaaaatgggttattactacagcctgtatgaatggtttaatccggtttataaagccgatgtgaatacctatgttagcgaacgtatgctgccgcagatgaaagatctggttacccgctataaaccggatattctgtggaccgatggcgaatgggattatccggcaaaaacctggcgtagcgaagaatttctggcatggctgtttaatgaaagtaatgttaaaaacgagatcgtggttaatgatcgttggggtagtgataccaaaagcaaacatggtagctttgccaccagtgaatatggccacggtggtaccgataataccgaaaccaccggtggctttcagcgtccgtgggaagaatgccgtggtatgggtgaaagttttggctataatcgtaatgaaaacctggatagctatcagaccggcgaagcactggtgcatcagctgattgatattgttgccaaaggcggtaatctgctgctgaatattggcccggcagccgatggcaccattccggttattatgcaggaacgcctgcatgaaattggcagctggctgaaagttaatggcagcgcaatttatggcacccgtcgctggagcaaagcaccggcatataccaaagaaagtaccctgtattttacccagaaaggtaaaaatctgaacgcaattacccgcaaatgggaagaaaccattagcattcagaatgtggcaaaaccgagtaaagttaccctgctgggttataaaggtgaagttaaatttacctacaagaacggtaccctgaccattatggccccgagcgtgaatccgagcaatattccgtgtcagtatgcctggacctatgaaattgaaaatgcactgggatccaaagataagtcgtatgatctgattgatgagaaagatttcccagataaggctttgcgagaagctgtgatggcgcaggttggaaccagaaaaggtgatttggaacgtttcaatggcacattacgattggataatccagcgattcaaagtttagaaggtctaaataaatttaaaaaattagctcaattagacttgattggcttatctcgcattacaaagctcgaccgttctgttttacccgctaatatgaagccaggcaaagataccttggaaacagttcttgaaacctataaaaaggataacaaagaagaacctgctactatcccaccagtatctttgaaggtttctggtttaactggtctgaaagaattagatttgtcaggttttgaccgtgaaaccttggctggtcttgatgccgctactctaacgtctttagaaaaagttgatatttctggcaacaaacttgatttggctccaggaacagaaaatcgacaaatttttgatactatgctatcaactatcagcaatcatgttggaagcaatgaacaaacagtgaaatttgacaagcaaaaaccaactgggcattacccagatacctatgggaaaactagtctgcgcttaccagtggcaaatgaaaaagttgatttgcaaagccagcttttgtttgggactgtgacaaatcaaggaaccctaatcaatagcgaagcagactataaggcttaccaaaatcataaaattgctggacgtagctttgttgattcaaactatcattacaataactttaaagtttcttatgagaactataccgttaaagtaactgattccacattgggaaccactactgacaaaacgctagcaactgataaagaagagacctataaggttgacttctttagcccagcagataagacaaaagctgttcatactgctaaagtgattgttggtgacgaaaaaaccatgatggttaatttggcagaaggcgcaacagttattggaggaagtgctgatcctgtaaatgcaagaaaggtatttgatgggcaactgggcagtgagactgataatatctctttaggatgggattctaagcaaagtattatatttaaattgaaagaagatggattaataaagcattggcgtttcttcaatgattcagcccgaaatcctgagacaaccaataaacctattcaggaagcaagtctacaaatttttaatatcaaagattataatctagataatttgttggaaaatcccaataaatttgatgatgaaaaatattggattactgtagatacttacagtgcacaaggagagagagctactgcattcagtaatacattaaataatattactagtaaatattggcgagttgtctttgatactaaaggagatagatatagttcgccagtagtccctgaactccaaattttaggttatccgttacctaacgccgacactatcatgaaaacagtaactactgctaaagagttatctcaacaaaaagataagttttctcaaaagatgcttgatgagttaaaaataaaagagatggctttagaaacttctttgaacagtaagatttttgatgtaactgctattaatgctaatgctggagttttgaaagattgtattgagaaaaggcagctgctaaaaaaataa

SEQ ID NO: 158 - protein, 1013 aa, Artificial Sequence
  SYNTHETIC FUSION PROTEN
MGSSHHHHHHSSGLVPRGSHMQYQANWQSLDQRPTPAWFEDAKFGIFIHWGLYSVPSWATKSNADGFGSGYSEWYWQRLFAKNLKIHPEFVEFHKKNFGDKNYQDFVQNFKAELFQPNDWANIFEQAGAKYVVLTSKHHEGFTLWPSKESWNWNSVDVGPHRDLAGDLMTAVRAKNLKMGYYYSLYEWFNPVYKADVNTYVSERMLPQMKDLVTRYKPDILWTDGEWDYPAKTWRSEEFLAWLFNESNVKNEIVVNDRWGSDTKSKHGSFATSEYGHGGTDNTETTGGFQRPWEECRGMGESFGYNRNENLDSYQTGEALVHQLIDIVAKGGNLLLNIGPAADGTIPVIMQERLHEIGSWLKVNGSAIYGTRRWSKAPAYTKESTLYFTQKGKNLNAITRKWEETISIQNVAKPSKVTLLGYKGEVKFTYKNGTLTIMAPSVNPSNIPCQYAWTYEIENALGSKDKSYDLIDEKDFPDKALREAVMAQVGTRKGDLERFNGTLRLDNPAIQSLEGLNKFKKLAQLDLIGLSRITKLDRSVLPANMKPGKDTLETVLETYKKDNKEEPATIPPVSLKVSGLTGLKELDLSGFDRETLAGLDAATLTSLEKVDISGNKLDLAPGTENRQIFDTMLSTISNHVGSNEQTVKFDKQKPTGHYPDTYGKTSLRLPVANEKVDLQSQLLFGTVTNQGTLINSEADYKAYQNHKIAGRSFVDSNYHYNNFKVSYENYTVKVTDSTLGTTTDKTLATDKEETYKVDFFSPADKTKAVHTAKVIVGDEKTMMVNLAEGATVIGGSADPVNARKVFDGQLGSETDNISLGWDSKQSIIFKLKEDGLIKHWRFFNDSARNPETTNKPIQEASLQIFNIKDYNLDNLLENPNKFDDEKYWITVDTYSAQGERATAFSNTLNNITSKYWRVVFDTKGDRYSSPVVPELQILGYPLPNADTIMKTVTTAKELSQQKDKFSQKMLDELKIKEMALETSLNSKIFDVTAINANAGVLKDCIEKRQLLKK

SEQ ID NO: 159 - DNA, 2769 bp, Artificial Sequence
  SYNTHETIC FUSION PROTEN
atgggcagcagccatcatcatcatcatcacagcagcggcctggtgccgcgcggcagccatatgcagtatcaggcaaattggcagagtctggatcagcgcccgaccccggcatggtttgaagatgccaaatttggcatttttatccattggggcctgtatagtgtgccgagctgggcaaccaaaagtaatgccgatggctttggtagcggctatagtgaatggtattggcagcgtctgtttgcaaaaaatctgaaaattcatccggaatttgtggaatttcataaaaaaaacttcggcgataagaactatcaggattttgtgcagaattttaaggcagaactgtttcagccgaatgattgggcaaatatttttgaacaggcaggcgccaaatatgttgtgctgaccagtaaacatcatgaaggttttaccctgtggccgagcaaagaaagctggaattggaatagtgttgatgtgggcccgcatcgtgatctggcaggtgatctgatgaccgccgtgcgtgcaaaaaatttaaaaatgggttattactacagcctgtatgaatggtttaatccggtttataaagccgatgtgaatacctatgttagcgaacgtatgctgccgcagatgaaagatctggttacccgctataaaccggatattctgtggaccgatggcgaatgggattatccggcaaaaacctggcgtagcgaagaatttctggcatggctgtttaatgaaagtaatgttaaaaacgagatcgtggttaatgatcgttggggtagtgataccaaaagcaaacatggtagctttgccaccagtgaatatggccacggtggtaccgataataccgaaaccaccggtggctttcagcgtccgtgggaagaatgccgtggtatgggtgaaagttttggctataatcgtaatgaaaacctggatagctatcagaccggcgaagcactggtgcatcagctgattgatattgttgccaaaggcggtaatctgctgctgaatattggcccggcagccgatggcaccattccggttattatgcaggaacgcctgcatgaaattggcagctggctgaaagttaatggcagcgcaatttatggcacccgtcgctggagcaaagcaccggcatataccaaagaaagtaccctgtattttacccagaaaggtaaaaatctgaacgcaattacccgcaaatgggaagaaaccattagcattcagaatgtggcaaaaccgagtaaagttaccctgctgggttataaaggtgaagttaaatttacctacaagaacggtaccctgaccattatggccccgagcgtgaatccgagcaatattccgtgtcagtatgcctggacctatgaaattgaaaatgcactgggatccaccgaagacaaacgctatgatgtcattgatcaaaaagacattcctgacccagcattaagagaacaaatcattcaacaagttggacagtataaaggcgatttggaacgttataacaagacattggtgcttacaggagataagattcaaaatcttaaaggactagaaaaattaagcaagttacaaaaattagagttgcgccagctatctaacgttaaagaaattactccagaacttttgccggaaagcatgaaaaaagatgctgagcttgttatggtaggcatgactggtttagaaaaactaaaccttagtggtctaaatcgtcaaactttagacggtatagacgtgaatagtattacgcatttgacatcatttgatatttcacataatagtttggacttgtcggaaaagagtgaagaccgtaaactattaatgactttgatggagcaggtttcaaatcatcaaaaaataacggtgaaaaatacggcttttgaaaatcaaaaaccgaaaggttattatcctcagacgtatgataccaaagaaggtcattatgatgttgataatgcagaacatgatattttaactgattttgtttttggaactgttactaaacgtaatacctttattggagacgaagaagcatttgctatctataaagaaggagctgtcgatggtcgacaatatgtgtctaaagactatacttatgaagcttttcgtaaagactataaaggttacaaggttcatttaactgcttctaacctaggagaaacagttacttctaaggtaactgctactactgatgaaacttacttagtagatgtttctgatggggaaaaagttgttcaccacatgaaactcaatataggatctggtgccatcatgatggaaaatctggcaaaaggggctaaagtgattggtacatctggggactttgagcaagcaaagaagattttcgatggtgaaaagtcagatagattcttcacttggggacaaactaactggatagcttttgatctaggagaaattaatcttgcgaaggaatggcgtttatttaatgcagagacaaatactgaaataaagacagatagtagcttaaacgtggctaaaggacgtcttcagattttaaaagatacaactattgatttagaaaaaatggacataaaaaatcgtaaagagtatctgtcgaatgatgaaaattggactgatgttgctcagatggatgatgcaaaagcgatatttaatagtaaattatccaatgttttatctcggtattggcggttttgtgtagatggtggagctagctcttattaccctcaatataccgaacttcaaatcctcggacaacgtttatcaaatgatgtcgctaatacgctgaaggattaa

SEQ ID NO: 160 - protein, 922 aa, Artificial Sequence
  SYNTHETIC FUSION PROTEN
MGSSHHHHHHSSGLVPRGSHMQYQANWQSLDQRPTPAWFEDAKFGIFIHWGLYSVPSWATKSNADGFGSGYSEWYWQRLFAKNLKIHPEFVEFHKKNFGDKNYQDFVQNFKAELFQPNDWANIFEQAGAKYVVLTSKHHEGFTLWPSKESWNWNSVDVGPHRDLAGDLMTAVRAKNLKMGYYYSLYEWFNPVYKADVNTYVSERMLPQMKDLVTRYKPDILWTDGEWDYPAKTWRSEEFLAWLFNESNVKNEIVVNDRWGSDTKSKHGSFATSEYGHGGTDNTETTGGFQRPWEECRGMGESFGYNRNENLDSYQTGEALVHQLIDIVAKGGNLLLNIGPAADGTIPVIMQERLHEIGSWLKVNGSAIYGTRRWSKAPAYTKESTLYFTQKGKNLNAITRKWEETISIQNVAKPSKVTLLGYKGEVKFTYKNGTLTIMAPSVNPSNIPCQYAWTYEIENALGSTEDKRYDVIDQKDIPDPALREQIIQQVGQYKGDLERYNKTLVLTGDKIQNLKGLEKLSKLQKLELRQLSNVKEITPELLPESMKKDAELVMVGMTGLEKLNLSGLNRQTLDGIDVNSITHLTSFDISHNSLDLSEKSEDRKLLMTLMEQVSNHQKITVKNTAFENQKPKGYYPQTYDTKEGHYDVDNAEHDILTDFVFGTVTKRNTFIGDEEAFAIYKEGAVDGRQYVSKDYTYEAFRKDYKGYKVHLTASNLGETVTSKVTATTDETYLVDVSDGEKVVHHMKLNIGSGAIMMENLAKGAKVIGTSGDFEQAKKIFDGEKSDRFFTWGQTNWIAFDLGEINLAKEWRLFNAETNTEIKTDSSLNVAKGRLQILKDTTIDLEKMDIKNRKEYLSNDENWTDVAQMDDAKAIFNSKLSNVLSRYWRFCVDGGASSYYPQYTELQILGQRLSNDVANTLKD

SEQ ID NO: 161 - DNA, 4302 bp, Artificial Sequence
  SYNTHETIC FUSION PROTEN
atgggcagcagccatcatcatcatcatcacagcagcggcctggtgccgcgcggcagccatatgcagtatcaggcaaattggcagagtctggatcagcgcccgaccccggcatggtttgaagatgccaaatttggcatttttatccattggggcctgtatagtgtgccgagctgggcaaccaaaagtaatgccgatggctttggtagcggctatagtgaatggtattggcagcgtctgtttgcaaaaaatctgaaaattcatccggaatttgtggaatttcataaaaaaaacttcggcgataagaactatcaggattttgtgcagaattttaaggcagaactgtttcagccgaatgattgggcaaatatttttgaacaggcaggcgccaaatatgttgtgctgaccagtaaacatcatgaaggttttaccctgtggccgagcaaagaaagctggaattggaatagtgttgatgtgggcccgcatcgtgatctggcaggtgatctgatgaccgccgtgcgtgcaaaaaatttaaaaatgggttattactacagcctgtatgaatggtttaatccggtttataaagccgatgtgaatacctatgttagcgaacgtatgctgccgcagatgaaagatctggttacccgctataaaccggatattctgtggaccgatggcgaatgggattatccggcaaaaacctggcgtagcgaagaatttctggcatggctgtttaatgaaagtaatgttaaaaacgagatcgtggttaatgatcgttggggtagtgataccaaaagcaaacatggtagctttgccaccagtgaatatggccacggtggtaccgataataccgaaaccaccggtggctttcagcgtccgtgggaagaatgccgtggtatgggtgaaagttttggctataatcgtaatgaaaacctggatagctatcagaccggcgaagcactggtgcatcagctgattgatattgttgccaaaggcggtaatctgctgctgaatattggcccggcagccgatggcaccattccggttattatgcaggaacgcctgcatgaaattggcagctggctgaaagttaatggcagcgcaatttatggcacccgtcgctggagcaaagcaccggcatataccaaagaaagtaccctgtattttacccagaaaggtaaaaatctgaacgcaattacccgcaaatgggaagaaaccattagcattcagaatgtggcaaaaccgagtaaagttaccctgctgggttataaaggtgaagttaaatttacctacaagaacggtaccctgaccattatggccccgagcgtgaatccgagcaatattccgtgtcagtatgcctggacctatgaaattgaaaatgcactgggatccacccaccatgattcactcaatactgtaaaagcggaggagaagactgttcaggttcagaaaggattaccttctatcgatagcttgcattatctgtcagagaatagcaaaaaagaatttaaagaagaactctcaaaagcggggcaagaatctcaaaaggtcaaagagatattagcaaaagctcagcaggcagataaacaagctcaagaacttgccaaaatgaaaattcctgagaaaataccgatgaaaccgttacatggttctctctacggtggttactttagaacttggcatgacaaaacatcagatccaacagaaaaagacaaagttaactcgatgggagagcttcctaaagaagtagatctagcctttattttccacgattggacaaaagattatagccttttttggaaagaattggccaccaaacatgtgccaaagttaaacaagcaagggacacgtgtcattcgtaccattccatggcgtttcctagctgggggtgataacagtggtattgcagaagataccagtaaatacccaaatacaccagagggaaataaagctttagccaaagctattgttgatgaatatgtttataaatacaaccttgatggcttagatgtggatgttgaacatgatagtattccaaaagttgacaaaaaagaagatacagcaggcgtagaacgctctattcaagtgtttgaagaaattgggaaattaattggaccaaaaggtgttgataaatcgcggttatttattatggatagcacctacatggctgataaaaacccattgattgagcgaggagctccttatattaatttattactggtacaggtctatggttcacaaggagagaaaggtggttgggagcctgtttctaatcgacctgaaaaaacaatggaagaacgatggcaaggttatagcaagtatattcgtcctgaacaatacatgattggtttttctttctatgaggaaaatgctcaagaagggaatctttggtatgatattaattctcgcaaggacgaggacaaagcaaatggaattaacactgacataactggaacgcgtgccgaacggtatgcaaggtggcaacctaagacaggtggggttaagggaggtatcttctcctacgctattgaccgagatggtgtagctcatcaacctaaaaaatatgctaaacagaaagagtttaaggacgcaactgataacatcttccactcagattatagtgtctccaaggcattaaagacagttatgctaaaagataagtcgtatgatctgattgatgagaaagatttcccagataaggctttgcgagaagctgtgatggcgcaggttggaaccagaaaaggtgatttggaacgtttcaatggcacattacgattggataatccagcgattcaaagtttagaaggtctaaataaatttaaaaaattagctcaattagacttgattggcttatctcgcattacaaagctcgaccgttctgttttacccgctaatatgaagccaggcaaagataccttggaaacagttcttgaaacctataaaaaggataacaaagaagaacctgctactatcccaccagtatctttgaaggtttctggtttaactggtctgaaagaattagatttgtcaggttttgaccgtgaaaccttggctggtcttgatgccgctactctaacgtctttagaaaaagttgatatttctggcaacaaacttgatttggctccaggaacagaaaatcgacaaatttttgatactatgctatcaactatcagcaatcatgttggaagcaatgaacaaacagtgaaatttgacaagcaaaaaccaactgggcattacccagatacctatgggaaaactagtctgcgcttaccagtggcaaatgaaaaagttgatttgcaaagccagcttttgtttgggactgtgacaaatcaaggaaccctaatcaatagcgaagcagactataaggcttaccaaaatcataaaattgctggacgtagctttgttgattcaaactatcattacaataactttaaagtttcttatgagaactataccgttaaagtaactgattccacattgggaaccactactgacaaaacgctagcaactgataaagaagagacctataaggttgacttctttagcccagcagataagacaaaagctgttcatactgctaaagtgattgttggtgacgaaaaaaccatgatggttaatttggcagaaggcgcaacagttattggaggaagtgctgatcctgtaaatgcaagaaaggtatttgatgggcaactgggcagtgagactgataatatctctttaggatgggattctaagcaaagtattatatttaaattgaaagaagatggattaataaagcattggcgtttcttcaatgattcagcccgaaatcctgagacaaccaataaacctattcaggaagcaagtctacaaatttttaatatcaaagattataatctagataatttgttggaaaatcccaataaatttgatgatgaaaaatattggattactgtagatacttacagtgcacaaggagagagagctactgcattcagtaatacattaaataatattactagtaaatattggcgagttgtctttgatactaaaggagatagatatagttcgccagtagtccctgaactccaaattttaggttatccgttacctaacgccgacactatcatgaaaacagtaactactgctaaagagttatctcaacaaaaagataagttttctcaaaagatgcttgatgagttaaaaataaaagagatggctttagaaacttctttgaacagtaagatttttgatgtaactgctattaatgctaatgctggagttttgaaagattgtattgagaaaaggcagctgctaaaaaaataa

SEQ ID NO: 162 - protein, 1432 aa, Artificial Sequence
  SYNTHETIC FUSION PROTEN
MGSSHHHHHHSSGLVPRGSHMQYQANWQSLDQRPTPAWFEDAKFGIFIHWGLYSVPSWATKSNADGFGSGYSEWYWQRLFAKNLKIHPEFVEFHKKNFGDKNYQDFVQNFKAELFQPNDWANIFEQAGAKYVVLTSKHHEGFTLWPSKESWNWNSVDVGPHRDLAGDLMTAVRAKNLKMGYYYSLYEWFNPVYKADVNTYVSERMLPQMKDLVTRYKPDILWTDGEWDYPAKTWRSEEFLAWLFNESNVKNEIVVNDRWGSDTKSKHGSFATSEYGHGGTDNTETTGGFQRPWEECRGMGESFGYNRNENLDSYQTGEALVHQLIDIVAKGGNLLLNIGPAADGTIPVIMQERLHEIGSWLKVNGSAIYGTRRWSKAPAYTKESTLYFTQKGKNLNAITRKWEETISIQNVAKPSKVTLLGYKGEVKFTYKNGTLTIMAPSVNPSNIPCQYAWTYEIENALGSTHHDSLNTVKAEEKTVQVQKGLPSIDSLHYLSENSKKEFKEELSKAGQESQKVKEILAKAQQADKQAQELAKMKIPEKIPMKPLHGSLYGGYFRTWHDKTSDPTEKDKVNSMGELPKEVDLAFIFHDWTKDYSLFWKELATKHVPKLNKQGTRVIRTIPWRFLAGGDNSGIAEDTSKYPNTPEGNKALAKAIVDEYVYKYNLDGLDVDVEHDSIPKVDKKEDTAGVERSIQVFEEIGKLIGPKGVDKSRLFIMDSTYMADKNPLIERGAPYINLLLVQVYGSQGEKGGWEPVSNRPEKTMEERWQGYSKYIRPEQYMIGFSFYEENAQEGNLWYDINSRKDEDKANGINTDITGTRAERYARWQPKTGGVKGGIFSYAIDRDGVAHQPKKYAKQKEFKDATDNIFHSDYSVSKALKTVMLKDKSYDLIDEKDFPDKALREAVMAQVGTRKGDLERFNGTLRLDNPAIQSLEGLNKFKKLAQLDLIGLSRITKLDRSVLPANMKPGKDTLETVLETYKKDNKEEPATIPPVSLKVSGLTGLKELDLSGFDRETLAGLDAATLTSLEKVDISGNKLDLAPGTENRQIFDTMLSTISNHVGSNEQTVKFDKQKPTGHYPDTYGKTSLRLPVANEKVDLQSQLLFGTVTNQGTLINSEADYKAYQNHKIAGRSFVDSNYHYNNFKVSYENYTVKVTDSTLGTTTDKTLATDKEETYKVDFFSPADKTKAVHTAKVIVGDEKTMMVNLAEGATVIGGSADPVNARKVFDGQLGSETDNISLGWDSKQSIIFKLKEDGLIKHWRFFNDSARNPETTNKPIQEASLQIFNIKDYNLDNLLENPNKFDDEKYWITVDTYSAQGERATAFSNTLNNITSKYWRVVFDTKGDRYSSPVVPELQILGYPLPNADTIMKTVTTAKELSQQKDKFSQKMLDELKIKEMALETSLNSKIFDVTAINANAGVLKDCIEKRQLLK

SEQ ID NO: 163 - DNA, 4302 bp, Artificial Sequence
  SYNTHETIC FUSION PROTEN
atgggcagcagccatcatcatcatcatcacagcagcggcctggtgccgcgcggcagccatatgcagtatcaggcaaattggcagagtctggatcagcgcccgaccccggcatggtttgaagatgccaaatttggcatttttatccattggggcctgtatagtgtgccgagctgggcaaccaaaagtaatgccgatggctttggtagcggctatagtgaatggtattggcagcgtctgtttgcaaaaaatctgaaaattcatccggaatttgtggaatttcataaaaaaaacttcggcgataagaactatcaggattttgtgcagaattttaaggcagaactgtttcagccgaatgattgggcaaatatttttgaacaggcaggcgccaaatatgttgtgctgaccagtaaacatcatgaaggttttaccctgtggccgagcaaagaaagctggaattggaatagtgttgatgtgggcccgcatcgtgatctggcaggtgatctgatgaccgccgtgcgtgcaaaaaatttaaaaatgggttattactacagcctgtatgaatggtttaatccggtttataaagccgatgtgaatacctatgttagcgaacgtatgctgccgcagatgaaagatctggttacccgctataaaccggatattctgtggaccgatggcgaatgggattatccggcaaaaacctggcgtagcgaagaatttctggcatggctgtttaatgaaagtaatgttaaaaacgagatcgtggttaatgatcgttggggtagtgataccaaaagcaaacatggtagctttgccaccagtgaatatggccacggtggtaccgataataccgaaaccaccggtggctttcagcgtccgtgggaagaatgccgtggtatgggtgaaagttttggctataatcgtaatgaaaacctggatagctatcagaccggcgaagcactggtgcatcagctgattgatattgttgccaaaggcggtaatctgctgctgaatattggcccggcagccgatggcaccattccggttattatgcaggaacgcctgcatgaaattggcagctggctgaaagttaatggcagcgcaatttatggcacccgtcgctggagcaaagcaccggcatataccaaagaaagtaccctgtattttacccagaaaggtaaaaatctgaacgcaattacccgcaaatgggaagaaaccattagcattcagaatgtggcaaaaccgagtaaagttaccctgctgggttataaaggtgaagttaaatttacctacaagaacggtaccctgaccattatggccccgagcgtgaatccgagcaatattccgtgtcagtatgcctggacctatgaaattgaaaatgcactgggatccacccaccatgattcactcaatactgtaaaagcggaggagaagactgttcaggttcagaaaggattaccttctatcgatagcttgcattatctgtcagagaatagcaaaaaagaatttaaagaagaactctcaaaagcggggcaagaatctcaaaaggtcaaagagatattagcaaaagctcagcaggcagataaacaagctcaagaacttgccaaaatgaaaattcctgagaaaataccgatgaaaccgttacatggttctctctacggtggttactttagaacttggcatgacaaaacatcagatccaacagaaaaagacaaagttaactcgatgggagagcttcctaaagaagtagatctagcctttattttccacgattggacaaaagattatagccttttttggaaagaattggccaccaaacatgtgccaaagttaaacaagcaagggacacgtgtcattcgtaccattccatggcgtttcctagctgggggtgataacagtggtattgcagaagataccagtaaatacccaaatacaccagagggaaataaagctttagccaaagctattgttgatgaatatgtttataaatacaaccttgatggcttagatgtgcaggttgaacatgatagtattccaaaagttgacaaaaaagaagatacagcaggcgtagaacgctctattcaagtgtttgaagaaattgggaaattaattggaccaaaaggtgttgataaatcgcggttatttattatggatagcacctacatggctgataaaaacccattgattgagcgaggagctccttatattaatttattactggtacaggtctatggttcacaaggagagaaaggtggttgggagcctgtttctaatcgacctgaaaaaacaatggaagaacgatggcaaggttatagcaagtatattcgtcctgaacaatacatgattggtttttctttctatgaggaaaatgctcaagaagggaatctttggtatgatattaattctcgcaaggacgaggacaaagcaaatggaattaacactgacataactggaacgcgtgccgaacggtatgcaaggtggcaacctaagacaggtggggttaagggaggtatcttctcctacgctattgaccgagatggtgtagctcatcaacctaaaaaatatgctaaacagaaagagtttaaggacgcaactgataacatcttccactcagattatagtgtctccaaggcattaaagacagttatgctaaaagataagtcgtatgatctgattgatgagaaagatttcccagataaggctttgcgagaagctgtgatggcgcaggttggaaccagaaaaggtgatttggaacgtttcaatggcacattacgattggataatccagcgattcaaagtttagaaggtctaaataaatttaaaaaattagctcaattagacttgattggcttatctcgcattacaaagctcgaccgttctgttttacccgctaatatgaagccaggcaaagataccttggaaacagttcttgaaacctataaaaaggataacaaagaagaacctgctactatcccaccagtatctttgaaggtttctggtttaactggtctgaaagaattagatttgtcaggttttgaccgtgaaaccttggctggtcttgatgccgctactctaacgtctttagaaaaagttgatatttctggcaacaaacttgatttggctccaggaacagaaaatcgacaaatttttgatactatgctatcaactatcagcaatcatgttggaagcaatgaacaaacagtgaaatttgacaagcaaaaaccaactgggcattacccagatacctatgggaaaactagtctgcgcttaccagtggcaaatgaaaaagttgatttgcaaagccagcttttgtttgggactgtgacaaatcaaggaaccctaatcaatagcgaagcagactataaggcttaccaaaatcataaaattgctggacgtagctttgttgattcaaactatcattacaataactttaaagtttcttatgagaactataccgttaaagtaactgattccacattgggaaccactactgacaaaacgctagcaactgataaagaagagacctataaggttgacttctttagcccagcagataagacaaaagctgttcatactgctaaagtgattgttggtgacgaaaaaaccatgatggttaatttggcagaaggcgcaacagttattggaggaagtgctgatcctgtaaatgcaagaaaggtatttgatgggcaactgggcagtgagactgataatatctctttaggatgggattctaagcaaagtattatatttaaattgaaagaagatggattaataaagcattggcgtttcttcaatgattcagcccgaaatcctgagacaaccaataaacctattcaggaagcaagtctacaaatttttaatatcaaagattataatctagataatttgttggaaaatcccaataaatttgatgatgaaaaatattggattactgtagatacttacagtgcacaaggagagagagctactgcattcagtaatacattaaataatattactagtaaatattggcgagttgtctttgatactaaaggagatagatatagttcgccagtagtccctgaactccaaattttaggttatccgttacctaacgccgacactatcatgaaaacagtaactactgctaaagagttatctcaacaaaaagataagttttctcaaaagatgcttgatgagttaaaaataaaagagatggctttagaaacttctttgaacagtaagatttttgatgtaactgctattaatgctaatgctggagttttgaaagattgtattgagaaaaggcagctgctaaaaaaataa

SEQ ID NO: 164 - protein, 1432 aa, Artificial Sequence
  SYNTHETIC FUSION PROTEN
MGSSHHHHHHSSGLVPRGSHMQYQANWQSLDQRPTPAWFEDAKFGIFIHWGLYSVPSWATKSNADGFGSGYSEWYWQRLFAKNLKIHPEFVEFHKKNFGDKNYQDFVQNFKAELFQPNDWANIFEQAGAKYVVLTSKHHEGFTLWPSKESWNWNSVDVGPHRDLAGDLMTAVRAKNLKMGYYYSLYEWFNPVYKADVNTYVSERMLPQMKDLVTRYKPDILWTDGEWDYPAKTWRSEEFLAWLFNESNVKNEIVVNDRWGSDTKSKHGSFATSEYGHGGTDNTETTGGFQRPWEECRGMGESFGYNRNENLDSYQTGEALVHQLIDIVAKGGNLLLNIGPAADGTIPVIMQERLHEIGSWLKVNGSAIYGTRRWSKAPAYTKESTLYFTQKGKNLNAITRKWEETISIQNVAKPSKVTLLGYKGEVKFTYKNGTLTIMAPSVNPSNIPCQYAWTYEIENALGSTHHDSLNTVKAEEKTVQVQKGLPSIDSLHYLSENSKKEFKEELSKAGQESQKVKEILAKAQQADKQAQELAKMKIPEKIPMKPLHGSLYGGYFRTWHDKTSDPTEKDKVNSMGELPKEVDLAFIFHDWTKDYSLFWKELATKHVPKLNKQGTRVIRTIPWRFLAGGDNSGIAEDTSKYPNTPEGNKALAKAIVDEYVYKYNLDGLDVQVEHDSIPKVDKKEDTAGVERSIQVFEEIGKLIGPKGVDKSRLFIMDSTYMADKNPLIERGAPYINLLLVQVYGSQGEKGGWEPVSNRPEKTMEERWQGYSKYIRPEQYMIGFSFYEENAQEGNLWYDINSRKDEDKANGINTDITGTRAERYARWQPKTGGVKGGIFSYAIDRDGVAHQPKKYAKQKEFKDATDNIFHSDYSVSKALKTVMLKDKSYDLIDEKDFPDKALREAVMAQVGTRKGDLERFNGTLRLDNPAIQSLEGLNKFKKLAQLDLIGLSRITKLDRSVLPANMKPGKDTLETVLETYKKDNKEEPATIPPVSLKVSGLTGLKELDLSGFDRETLAGLDAATLTSLEKVDISGNKLDLAPGTENRQIFDTMLSTISNHVGSNEQTVKFDKQKPTGHYPDTYGKTSLRLPVANEKVDLQSQLLFGTVTNQGTLINSEADYKAYQNHKIAGRSFVDSNYHYNNFKVSYENYTVKVTDSTLGTTTDKTLATDKEETYKVDFFSPADKTKAVHTAKVIVGDEKTMMVNLAEGATVIGGSADPVNARKVFDGQLGSETDNISLGWDSKQSIIFKLKEDGLIKHWRFFNDSARNPETTNKPIQEASLQIFNIKDYNLDNLLENPNKFDDEKYWITVDTYSAQGERATAFSNTLNNITSKYWRVVFDTKGDRYSSPVVPELQILGYPLPNADTIMKTVTTAKELSQQKDKFSQKMLDELKIKEMALETSLNSKIFDVTAINANAGVLKDCIEKRQLLK

SEQ ID NO: 165 - DNA, 3813 bp, Artificial Sequence
  SYNTHETIC FUSION PROTEN
atgggcagcagccatcatcatcatcatcacagcagcggcctggtgccgcgcggcagccatatgcagtatcaggcaaattggcagagtctggatcagcgcccgaccccggcatggtttgaagatgccaaatttggcatttttatccattggggcctgtatagtgtgccgagctgggcaaccaaaagtaatgccgatggctttggtagcggctatagtgaatggtattggcagcgtctgtttgcaaaaaatctgaaaattcatccggaatttgtggaatttcataaaaaaaacttcggcgataagaactatcaggattttgtgcagaattttaaggcagaactgtttcagccgaatgattgggcaaatatttttgaacaggcaggcgccaaatatgttgtgctgaccagtaaacatcatgaaggttttaccctgtggccgagcaaagaaagctggaattggaatagtgttgatgtgggcccgcatcgtgatctggcaggtgatctgatgaccgccgtgcgtgcaaaaaatttaaaaatgggttattactacagcctgtatgaatggtttaatccggtttataaagccgatgtgaatacctatgttagcgaacgtatgctgccgcagatgaaagatctggttacccgctataaaccggatattctgtggaccgatggcgaatgggattatccggcaaaaacctggcgtagcgaagaatttctggcatggctgtttaatgaaagtaatgttaaaaacgagatcgtggttaatgatcgttggggtagtgataccaaaagcaaacatggtagctttgccaccagtgaatatggccacggtggtaccgataataccgaaaccaccggtggctttcagcgtccgtgggaagaatgccgtggtatgggtgaaagttttggctataatcgtaatgaaaacctggatagctatcagaccggcgaagcactggtgcatcagctgattgatattgttgccaaaggcggtaatctgctgctgaatattggcccggcagccgatggcaccattccggttattatgcaggaacgcctgcatgaaattggcagctggctgaaagttaatggcagcgcaatttatggcacccgtcgctggagcaaagcaccggcatataccaaagaaagtaccctgtattttacccagaaaggtaaaaatctgaacgcaattacccgcaaatgggaagaaaccattagcattcagaatgtggcaaaaccgagtaaagttaccctgctgggttataaaggtgaagttaaatttacctacaagaacggtaccctgaccattatggccccgagcgtgaatccgagcaatattccgtgtcagtatgcctggacctatgaaattgaaaatgcactgggatccgaggagaagactgttcaaacaggaaagacagatcagcaggttggtgctaaattggtacaggaaatccgtgaaggaaaacgcggaccactatatgctggttattttaggacatggcatgatcgtgcttcaacaggaatagatggtaaacagcaacatccagaaaatactatggctgaggtcccaaaagaagttgatatcttatttgtttttcatgaccatacagcttcagatagtccattttggtctgaattaaaggacagttatgtccataaattacatcaacagggaacggcacttgttcagacaattggtgttaacgaattaaatggacgtacaggtttatctaaagattatcctgatactcctgaggggaacaaagctttagcagcagccattgtcaaggcatttgtaactgatcgtggtgtcgatggactagatattgatattgagcacgaatttacgaacaaaagaacacctgaagaagatgctcgtgctctaaatgtttttaaagagattgcgcagttaataggtaaaaatggtagtgataaatctaaattgctcatcatggacactaccctaagtgttgaaaataatccaatatttaaagggatagcggaagatcttgattatcttcttagacaatattatggttcacaaggtggagaagctgaagtggatactataaactctgattggaaccaatatcagaattatattgatgctagccagttcatgattggattctccttttttgaagaatctgcgtccaaagggaatttatggtttgatgttaacgaatacgaccctaacaatcctgaaaaagggaaagatattgaaggaacacgtgctaaaaaatatgcagagtggcaacctagtacaggtggtttaaaagcaggtatattctcttatgctattgatcgtgatggagtggctcatgttccttcaacatataaaaataggactagtacaaatttacaacggcatgaagtcgataatatctcacatactgactacaccgtatctcgaaaattaaaaacattgatgaccgaagacaaacgctatgatgtcattgatcaaaaagacattcctgacccagcattaagagaacaaatcattcaacaagttggacagtataaaggcgatttggaacgttataacaagacattggtgcttacaggagataagattcaaaatcttaaaggactagaaaaattaagcaagttacaaaaattagagttgcgccagctatctaacgttaaagaaattactccagaacttttgccggaaagcatgaaaaaagatgctgagcttgttatggtaggcatgactggtttagaaaaactaaaccttagtggtctaaatcgtcaaactttagacggtatagacgtgaatagtattacgcatttgacatcatttgatatttcacataatagtttggacttgtcggaaaagagtgaagaccgtaaactattaatgactttgatggagcaggtttcaaatcatcaaaaaataacggtgaaaaatacggcttttgaaaatcaaaaaccgaaaggttattatcctcagacgtatgataccaaagaaggtcattatgatgttgataatgcagaacatgatattttaactgattttgtttttggaactgttactaaacgtaatacctttattggagacgaagaagcatttgctatctataaagaaggagctgtcgatggtcgacaatatgtgtctaaagactatacttatgaagcttttcgtaaagactataaaggttacaaggttcatttaactgcttctaacctaggagaaacagttacttctaaggtaactgctactactgatgaaacttacttagtagatgtttctgatggggaaaaagttgttcaccacatgaaactcaatataggatctggtgccatcatgatggaaaatctggcaaaaggggctaaagtgattggtacatctggggactttgagcaagcaaagaagattttcgatggtgaaaagtcagatagattcttcacttggggacaaactaactggatagcttttgatctaggagaaattaatcttgcgaaggaatggcgtttatttaatgcagagacaaatactgaaataaagacagatagtagcttaaacgtggctaaaggacgtcttcagattttaaaagatacaactattgatttagaaaaaatggacataaaaaatcgtaaagagtatctgtcgaatgatgaaaattggactgatgttgctcagatggatgatgcaaaagcgatatttaatagtaaattatccaatgttttatctcggtattggcggttttgtgtagatggtggagctagctcttattaccctcaatataccgaacttcaaatcctcggacaacgtttatcaaatgatgtcgctaatacgctgaaggattaa

SEQ ID NO: 166 - protein, 1270 aa, Artificial Sequence
  SYNTHETIC FUSION PROTEN
MGSSHHHHHHSSGLVPRGSHMQYQANWQSLDQRPTPAWFEDAKFGIFIHWGLYSVPSWATKSNADGFGSGYSEWYWQRLFAKNLKIHPEFVEFHKKNFGDKNYQDFVQNFKAELFQPNDWANIFEQAGAKYVVLTSKHHEGFTLWPSKESWNWNSVDVGPHRDLAGDLMTAVRAKNLKMGYYYSLYEWFNPVYKADVNTYVSERMLPQMKDLVTRYKPDILWTDGEWDYPAKTWRSEEFLAWLFNESNVKNEIVVNDRWGSDTKSKHGSFATSEYGHGGTDNTETTGGFQRPWEECRGMGESFGYNRNENLDSYQTGEALVHQLIDIVAKGGNLLLNIGPAADGTIPVIMQERLHEIGSWLKVNGSAIYGTRRWSKAPAYTKESTLYFTQKGKNLNAITRKWEETISIQNVAKPSKVTLLGYKGEVKFTYKNGTLTIMAPSVNPSNIPCQYAWTYEIENALGSEEKTVQTGKTDQQVGAKLVQEIREGKRGPLYAGYFRTWHDRASTGIDGKQQHPENTMAEVPKEVDILFVFHDHTASDSPFWSELKDSYVHKLHQQGTALVQTIGVNELNGRTGLSKDYPDTPEGNKALAAAIVKAFVTDRGVDGLDIDIEHEFTNKRTPEEDARALNVFKEIAQLIGKNGSDKSKLLIMDTTLSVENNPIFKGIAEDLDYLLRQYYGSQGGEAEVDTINSDWNQYQNYIDASQFMIGFSFFEESASKGNLWFDVNEYDPNNPEKGKDIEGTRAKKYAEWQPSTGGLKAGIFSYAIDRDGVAHVPSTYKNRTSTNLQRHEVDNISHTDYTVSRKLKTLMTEDKRYDVIDQKDIPDPALREQIIQQVGQYKGDLERYNKTLVLTGDKIQNLKGLEKLSKLQKLELRQLSNVKEITPELLPESMKKDAELVMVGMTGLEKLNLSGLNRQTLDGIDVNSITHLTSFDISHNSLDLSEKSEDRKLLMTLMEQVSNHQKITVKNTAFENQKPKGYYPQTYDTKEGHYDVDNAEHDILTDFVFGTVTKRNTFIGDEEAFAIYKEGAVDGRQYVSKDYTYEAFRKDYKGYKVHLTASNLGETVTSKVTATTDETYLVDVSDGEKVVHHMKLNIGSGAIMMENLAKGAKVIGTSGDFEQAKKIFDGEKSDRFFTWGQTNWIAFDLGEINLAKEWRLFNAETNTEIKTDSSLNVAKGRLQILKDTTIDLEKMDIKNRKEYLSNDENWTDVAQMDDAKAIFNSKLSNVLSRYWRFCVDGGASSYYPQYTELQILGQRLSNDVANTLKD

SEQ ID NO: 167 - DNA, 3813 bp, Artificial Sequence
  SYNTHETIC FUSION PROTEN
atgggcagcagccatcatcatcatcatcacagcagcggcctggtgccgcgcggcagccatatgcagtatcaggcaaattggcagagtctggatcagcgcccgaccccggcatggtttgaagatgccaaatttggcatttttatccattggggcctgtatagtgtgccgagctgggcaaccaaaagtaatgccgatggctttggtagcggctatagtgaatggtattggcagcgtctgtttgcaaaaaatctgaaaattcatccggaatttgtggaatttcataaaaaaaacttcggcgataagaactatcaggattttgtgcagaattttaaggcagaactgtttcagccgaatgattgggcaaatatttttgaacaggcaggcgccaaatatgttgtgctgaccagtaaacatcatgaaggttttaccctgtggccgagcaaagaaagctggaattggaatagtgttgatgtgggcccgcatcgtgatctggcaggtgatctgatgaccgccgtgcgtgcaaaaaatttaaaaatgggttattactacagcctgtatgaatggtttaatccggtttataaagccgatgtgaatacctatgttagcgaacgtatgctgccgcagatgaaagatctggttacccgctataaaccggatattctgtggaccgatggcgaatgggattatccggcaaaaacctggcgtagcgaagaatttctggcatggctgtttaatgaaagtaatgttaaaaacgagatcgtggttaatgatcgttggggtagtgataccaaaagcaaacatggtagctttgccaccagtgaatatggccacggtggtaccgataataccgaaaccaccggtggctttcagcgtccgtgggaagaatgccgtggtatgggtgaaagttttggctataatcgtaatgaaaacctggatagctatcagaccggcgaagcactggtgcatcagctgattgatattgttgccaaaggcggtaatctgctgctgaatattggcccggcagccgatggcaccattccggttattatgcaggaacgcctgcatgaaattggcagctggctgaaagttaatggcagcgcaatttatggcacccgtcgctggagcaaagcaccggcatataccaaagaaagtaccctgtattttacccagaaaggtaaaaatctgaacgcaattacccgcaaatgggaagaaaccattagcattcagaatgtggcaaaaccgagtaaagttaccctgctgggttataaaggtgaagttaaatttacctacaagaacggtaccctgaccattatggccccgagcgtgaatccgagcaatattccgtgtcagtatgcctggacctatgaaattgaaaatgcactgggatccgaggagaagactgttcaaacaggaaagacagatcagcaggttggtgctaaattggtacaggaaatccgtgaaggaaaacgcggaccactatatgctggttattttaggacatggcatgatcgtgcttcaacaggaatagatggtaaacagcaacatccagaaaatactatggctgaggtcccaaaagaagttgatatcttatttgtttttcatgaccatacagcttcagatagtccattttggtctgaattaaaggacagttatgtccataaattacatcaacagggaacggcacttgttcaggaaattggtgttaacgaattaaatggacgtacaggtttatctaaagattatcctgatactcctgaggggaacaaagctttagcagcagccattgtcaaggcatttgtaactgatcgtggtgtcgatggactagatattgatattgagcacgaatttacgaacaaaagaacacctgaagaagatgctcgtgctctaaatgtttttaaagagattgcgcagttaataggtaaaaatggtagtgataaatctaaattgctcatcatggacactaccctaagtgttgaaaataatccaatatttaaagggatagcggaagatcttgattatcttcttagacaatattatggttcacaaggtggagaagctgaagtggatactataaactctgattggaaccaatatcagaattatattgatgctagccagttcatgattggattctccttttttgaagaatctgcgtccaaagggaatttatggtttgatgttaacgaatacgaccctaacaatcctgaaaaagggaaagatattgaaggaacacgtgctaaaaaatatgcagagtggcaacctagtacaggtggtttaaaagcaggtatattctcttatgctattgatcgtgatggagtggctcatgttccttcaacatataaaaataggactagtacaaatttacaacggcatgaagtcgataatatctcacatactgactacaccgtatctcgaaaattaaaaacattgatgaccgaagacaaacgctatgatgtcattgatcaaaaagacattcctgacccagcattaagagaacaaatcattcaacaagttggacagtataaaggcgatttggaacgttataacaagacattggtgcttacaggagataagattcaaaatcttaaaggactagaaaaattaagcaagttacaaaaattagagttgcgccagctatctaacgttaaagaaattactccagaacttttgccggaaagcatgaaaaaagatgctgagcttgttatggtaggcatgactggtttagaaaaactaaaccttagtggtctaaatcgtcaaactttagacggtatagacgtgaatagtattacgcatttgacatcatttgatatttcacataatagtttggacttgtcggaaaagagtgaagaccgtaaactattaatgactttgatggagcaggtttcaaatcatcaaaaaataacggtgaaaaatacggcttttgaaaatcaaaaaccgaaaggttattatcctcagacgtatgataccaaagaaggtcattatgatgttgataatgcagaacatgatattttaactgattttgtttttggaactgttactaaacgtaatacctttattggagacgaagaagcatttgctatctataaagaaggagctgtcgatggtcgacaatatgtgtctaaagactatacttatgaagcttttcgtaaagactataaaggttacaaggttcatttaactgcttctaacctaggagaaacagttacttctaaggtaactgctactactgatgaaacttacttagtagatgtttctgatggggaaaaagttgttcaccacatgaaactcaatataggatctggtgccatcatgatggaaaatctggcaaaaggggctaaagtgattggtacatctggggactttgagcaagcaaagaagattttcgatggtgaaaagtcagatagattcttcacttggggacaaactaactggatagcttttgatctaggagaaattaatcttgcgaaggaatggcgtttatttaatgcagagacaaatactgaaataaagacagatagtagcttaaacgtggctaaaggacgtcttcagattttaaaagatacaactattgatttagaaaaaatggacataaaaaatcgtaaagagtatctgtcgaatgatgaaaattggactgatgttgctcagatggatgatgcaaaagcgatatttaatagtaaattatccaatgttttatctcggtattggcggttttgtgtagatggtggagctagctcttattaccctcaatataccgaacttcaaatcctcggacaacgtttatcaaatgatgtcgctaatacgctgaaggattaa

SEQ ID NO: 168 - protein, 1270 aa, Artificial Sequence
  SYNTHETIC FUSION PROTEN
MGSSHHHHHHSSGLVPRGSHMQYQANWQSLDQRPTPAWFEDAKFGIFIHWGLYSVPSWATKSNADGFGSGYSEWYWQRLFAKNLKIHPEFVEFHKKNFGDKNYQDFVQNFKAELFQPNDWANIFEQAGAKYVVLTSKHHEGFTLWPSKESWNWNSVDVGPHRDLAGDLMTAVRAKNLKMGYYYSLYEWFNPVYKADVNTYVSERMLPQMKDLVTRYKPDILWTDGEWDYPAKTWRSEEFLAWLFNESNVKNEIVVNDRWGSDTKSKHGSFATSEYGHGGTDNTETTGGFQRPWEECRGMGESFGYNRNENLDSYQTGEALVHQLIDIVAKGGNLLLNIGPAADGTIPVIMQERLHEIGSWLKVNGSAIYGTRRWSKAPAYTKESTLYFTQKGKNLNAITRKWEETISIQNVAKPSKVTLLGYKGEVKFTYKNGTLTIMAPSVNPSNIPCQYAWTYEIENALGSEEKTVQTGKTDQQVGAKLVQEIREGKRGPLYAGYFRTWHDRASTGIDGKQQHPENTMAEVPKEVDILFVFHDHTASDSPFWSELKDSYVHKLHQQGTALVQEIGVNELNGRTGLSKDYPDTPEGNKALAAAIVKAFVTDRGVDGLDIDIEHEFTNKRTPEEDARALNVFKEIAQLIGKNGSDKSKLLIMDTTLSVENNPIFKGIAEDLDYLLRQYYGSQGGEAEVDTINSDWNQYQNYIDASQFMIGFSFFEESASKGNLWFDVNEYDPNNPEKGKDIEGTRAKKYAEWQPSTGGLKAGIFSYAIDRDGVAHVPSTYKNRTSTNLQRHEVDNISHTDYTVSRKLKTLMTEDKRYDVIDQKDIPDPALREQIIQQVGQYKGDLERYNKTLVLTGDKIQNLKGLEKLSKLQKLELRQLSNVKEITPELLPESMKKDAELVMVGMTGLEKLNLSGLNRQTLDGIDVNSITHLTSFDISHNSLDLSEKSEDRKLLMTLMEQVSNHQKITVKNTAFENQKPKGYYPQTYDTKEGHYDVDNAEHDILTDFVFGTVTKRNTFIGDEEAFAIYKEGAVDGRQYVSKDYTYEAFRKDYKGYKVHLTASNLGETVTSKVTATTDETYLVDVSDGEKVVHHMKLNIGSGAIMMENLAKGAKVIGTSGDFEQAKKIFDGEKSDRFFTWGQTNWIAFDLGEINLAKEWRLFNAETNTEIKTDSSLNVAKGRLQILKDTTIDLEKMDIKNRKEYLSNDENWTDVAQMDDAKAIFNSKLSNVLSRYWRFCVDGGASSYYPQYTELQILGQRLSNDVANTLKD

SEQ ID NO: 169 - DNA, 3813 bp, Artificial Sequence
  SYNTHETIC FUSION PROTEN
atgggcagcagccatcatcatcatcatcacagcagcggcctggtgccgcgcggcagccatatgcagtatcaggcaaattggcagagtctggatcagcgcccgaccccggcatggtttgaagatgccaaatttggcatttttatccattggggcctgtatagtgtgccgagctgggcaaccaaaagtaatgccgatggctttggtagcggctatagtgaatggtattggcagcgtctgtttgcaaaaaatctgaaaattcatccggaatttgtggaatttcataaaaaaaacttcggcgataagaactatcaggattttgtgcagaattttaaggcagaactgtttcagccgaatgattgggcaaatatttttgaacaggcaggcgccaaatatgttgtgctgaccagtaaacatcatgaaggttttaccctgtggccgagcaaagaaagctggaattggaatagtgttgatgtgggcccgcatcgtgatctggcaggtgatctgatgaccgccgtgcgtgcaaaaaatttaaaaatgggttattactacagcctgtatgaatggtttaatccggtttataaagccgatgtgaatacctatgttagcgaacgtatgctgccgcagatgaaagatctggttacccgctataaaccggatattctgtggaccgatggcgaatgggattatccggcaaaaacctggcgtagcgaagaatttctggcatggctgtttaatgaaagtaatgttaaaaacgagatcgtggttaatgatcgttggggtagtgataccaaaagcaaacatggtagctttgccaccagtgaatatggccacggtggtaccgataataccgaaaccaccggtggctttcagcgtccgtgggaagaatgccgtggtatgggtgaaagttttggctataatcgtaatgaaaacctggatagctatcagaccggcgaagcactggtgcatcagctgattgatattgttgccaaaggcggtaatctgctgctgaatattggcccggcagccgatggcaccattccggttattatgcaggaacgcctgcatgaaattggcagctggctgaaagttaatggcagcgcaatttatggcacccgtcgctggagcaaagcaccggcatataccaaagaaagtaccctgtattttacccagaaaggtaaaaatctgaacgcaattacccgcaaatgggaagaaaccattagcattcagaatgtggcaaaaccgagtaaagttaccctgctgggttataaaggtgaagttaaatttacctacaagaacggtaccctgaccattatggccccgagcgtgaatccgagcaatattccgtgtcagtatgcctggacctatgaaattgaaaatgcactgggatccgaggagaagactgttcaaacaggaaagacagatcagcaggttggtgctaaattggtacaggaaatccgtgaaggaaaacgcggaccactatatgctggttattttaggacatggcatgatcgtgcttcaacaggaatagatggtaaacagcaacatccagaaaatactatggctgaggtcccaaaagaagttgatatcttatttgtttttcatgaccatacagcttcagatagtccattttggtctgaattaaaggacagttatgtccataaattacatcaacagggaacggcacttgttcagatgattggtgttaacgaattaaatggacgtacaggtttatctaaagattatcctgatactcctgaggggaacaaagctttagcagcagccattgtcaaggcatttgtaactgatcgtggtgtcgatggactagatattgatattgagcacgaatttacgaacaaaagaacacctgaagaagatgctcgtgctctaaatgtttttaaagagattgcgcagttaataggtaaaaatggtagtgataaatctaaattgctcatcatggacactaccctaagtgttgaaaataatccaatatttaaagggatagcggaagatcttgattatcttcttagacaatattatggttcacaaggtggagaagctgaagtggatactataaactctgattggaaccaatatcagaattatattgatgctagccagttcatgattggattctccttttttgaagaatctgcgtccaaagggaatttatggtttgatgttaacgaatacgaccctaacaatcctgaaaaagggaaagatattgaaggaacacgtgctaaaaaatatgcagagtggcaacctagtacaggtggtttaaaagcaggtatattctcttatgctattgatcgtgatggagtggctcatgttccttcaacatataaaaataggactagtacaaatttacaacggcatgaagtcgataatatctcacatactgactacaccgtatctcgaaaattaaaaacattgatgaccgaagacaaacgctatgatgtcattgatcaaaaagacattcctgacccagcattaagagaacaaatcattcaacaagttggacagtataaaggcgatttggaacgttataacaagacattggtgcttacaggagataagattcaaaatcttaaaggactagaaaaattaagcaagttacaaaaattagagttgcgccagctatctaacgttaaagaaattactccagaacttttgccggaaagcatgaaaaaagatgctgagcttgttatggtaggcatgactggtttagaaaaactaaaccttagtggtctaaatcgtcaaactttagacggtatagacgtgaatagtattacgcatttgacatcatttgatatttcacataatagtttggacttgtcggaaaagagtgaagaccgtaaactattaatgactttgatggagcaggtttcaaatcatcaaaaaataacggtgaaaaatacggcttttgaaaatcaaaaaccgaaaggttattatcctcagacgtatgataccaaagaaggtcattatgatgttgataatgcagaacatgatattttaactgattttgtttttggaactgttactaaacgtaatacctttattggagacgaagaagcatttgctatctataaagaaggagctgtcgatggtcgacaatatgtgtctaaagactatacttatgaagcttttcgtaaagactataaaggttacaaggttcatttaactgcttctaacctaggagaaacagttacttctaaggtaactgctactactgatgaaacttacttagtagatgtttctgatggggaaaaagttgttcaccacatgaaactcaatataggatctggtgccatcatgatggaaaatctggcaaaaggggctaaagtgattggtacatctggggactttgagcaagcaaagaagattttcgatggtgaaaagtcagatagattcttcacttggggacaaactaactggatagcttttgatctaggagaaattaatcttgcgaaggaatggcgtttatttaatgcagagacaaatactgaaataaagacagatagtagcttaaacgtggctaaaggacgtcttcagattttaaaagatacaactattgatttagaaaaaatggacataaaaaatcgtaaagagtatctgtcgaatgatgaaaattggactgatgttgctcagatggatgatgcaaaagcgatatttaatagtaaattatccaatgttttatctcggtattggcggttttgtgtagatggtggagctagctcttattaccctcaatataccgaacttcaaatcctcggacaacgtttatcaaatgatgtcgctaatacgctgaaggattaa

SEQ ID NO: 170 - protein, 1270 aa, Artificial Sequence
  SYNTHETIC FUSION PROTEN
MGSSHHHHHHSSGLVPRGSHMQYQANWQSLDQRPTPAWFEDAKFGIFIHWGLYSVPSWATKSNADGFGSGYSEWYWQRLFAKNLKIHPEFVEFHKKNFGDKNYQDFVQNFKAELFQPNDWANIFEQAGAKYVVLTSKHHEGFTLWPSKESWNWNSVDVGPHRDLAGDLMTAVRAKNLKMGYYYSLYEWFNPVYKADVNTYVSERMLPQMKDLVTRYKPDILWTDGEWDYPAKTWRSEEFLAWLFNESNVKNEIVVNDRWGSDTKSKHGSFATSEYGHGGTDNTETTGGFQRPWEECRGMGESFGYNRNENLDSYQTGEALVHQLIDIVAKGGNLLLNIGPAADGTIPVIMQERLHEIGSWLKVNGSAIYGTRRWSKAPAYTKESTLYFTQKGKNLNAITRKWEETISIQNVAKPSKVTLLGYKGEVKFTYKNGTLTIMAPSVNPSNIPCQYAWTYEIENALGSEEKTVQTGKTDQQVGAKLVQEIREGKRGPLYAGYFRTWHDRASTGIDGKQQHPENTMAEVPKEVDILFVFHDHTASDSPFWSELKDSYVHKLHQQGTALVQMIGVNELNGRTGLSKDYPDTPEGNKALAAAIVKAFVTDRGVDGLDIDIEHEFTNKRTPEEDARALNVFKEIAQLIGKNGSDKSKLLIMDTTLSVENNPIFKGIAEDLDYLLRQYYGSQGGEAEVDTINSDWNQYQNYIDASQFMIGFSFFEESASKGNLWFDVNEYDPNNPEKGKDIEGTRAKKYAEWQPSTGGLKAGIFSYAIDRDGVAHVPSTYKNRTSTNLQRHEVDNISHTDYTVSRKLKTLMTEDKRYDVIDQKDIPDPALREQIIQQVGQYKGDLERYNKTLVLTGDKIQNLKGLEKLSKLQKLELRQLSNVKEITPELLPESMKKDAELVMVGMTGLEKLNLSGLNRQTLDGIDVNSITHLTSFDISHNSLDLSEKSEDRKLLMTLMEQVSNHQKITVKNTAFENQKPKGYYPQTYDTKEGHYDVDNAEHDILTDFVFGTVTKRNTFIGDEEAFAIYKEGAVDGRQYVSKDYTYEAFRKDYKGYKVHLTASNLGETVTSKVTATTDETYLVDVSDGEKVVHHMKLNIGSGAIMMENLAKGAKVIGTSGDFEQAKKIFDGEKSDRFFTWGQTNWIAFDLGEINLAKEWRLFNAETNTEIKTDSSLNVAKGRLQILKDTTIDLEKMDIKNRKEYLSNDENWTDVAQMDDAKAIFNSKLSNVLSRYWRFCVDGGASSYYPQYTELQILGQRLSNDVANTLKD

SEQ ID NO: 171 - DNA, 3813 bp, Artificial Sequence
  SYNTHETIC FUSION PROTEN
atgggcagcagccatcatcatcatcatcacagcagcggcctggtgccgcgcggcagccatatgcagtatcaggcaaattggcagagtctggatcagcgcccgaccccggcatggtttgaagatgccaaatttggcatttttatccattggggcctgtatagtgtgccgagctgggcaaccaaaagtaatgccgatggctttggtagcggctatagtgaatggtattggcagcgtctgtttgcaaaaaatctgaaaattcatccggaatttgtggaatttcataaaaaaaacttcggcgataagaactatcaggattttgtgcagaattttaaggcagaactgtttcagccgaatgattgggcaaatatttttgaacaggcaggcgccaaatatgttgtgctgaccagtaaacatcatgaaggttttaccctgtggccgagcaaagaaagctggaattggaatagtgttgatgtgggcccgcatcgtgatctggcaggtgatctgatgaccgccgtgcgtgcaaaaaatttaaaaatgggttattactacagcctgtatgaatggtttaatccggtttataaagccgatgtgaatacctatgttagcgaacgtatgctgccgcagatgaaagatctggttacccgctataaaccggatattctgtggaccgatggcgaatgggattatccggcaaaaacctggcgtagcgaagaatttctggcatggctgtttaatgaaagtaatgttaaaaacgagatcgtggttaatgatcgttggggtagtgataccaaaagcaaacatggtagctttgccaccagtgaatatggccacggtggtaccgataataccgaaaccaccggtggctttcagcgtccgtgggaagaatgccgtggtatgggtgaaagttttggctataatcgtaatgaaaacctggatagctatcagaccggcgaagcactggtgcatcagctgattgatattgttgccaaaggcggtaatctgctgctgaatattggcccggcagccgatggcaccattccggttattatgcaggaacgcctgcatgaaattggcagctggctgaaagttaatggcagcgcaatttatggcacccgtcgctggagcaaagcaccggcatataccaaagaaagtaccctgtattttacccagaaaggtaaaaatctgaacgcaattacccgcaaatgggaagaaaccattagcattcagaatgtggcaaaaccgagtaaagttaccctgctgggttataaaggtgaagttaaatttacctacaagaacggtaccctgaccattatggccccgagcgtgaatccgagcaatattccgtgtcagtatgcctggacctatgaaattgaaaatgcactgggatccgaggagaagactgttcaaacaggaaagacagatcagcaggttggtgctaaattggtacaggaaatccgtgaaggaaaacgcggaccactatatgctggttattttaggacatggcatgatcgtgcttcaacaggaatagatggtaaacagcaacatccagaaaatactatggctgaggtcccaaaagaagttgatatcttatttgtttttcatgaccatacagcttcagatagtccattttggtctgaattaaaggacagttatgtccataaattacatcaacagggaacggcacttgttcagacaattggtgttaacgaattaaatggacgtacaggtttatctaaagattatcctgatactcctgaggggaacaaagctttagcagcagccattgtcaaggcatttgtaactgatcgtggtgtcgatggactagatattatgattgagcacgaatttacgaacaaaagaacacctgaagaagatgctcgtgctctaaatgtttttaaagagattgcgcagttaataggtaaaaatggtagtgataaatctaaattgctcatcatggacactaccctaagtgttgaaaataatccaatatttaaagggatagcggaagatcttgattatcttcttagacaatattatggttcacaaggtggagaagctgaagtggatactataaactctgattggaaccaatatcagaattatattgatgctagccagttcatgattggattctccttttttgaagaatctgcgtccaaagggaatttatggtttgatgttaacgaatacgaccctaacaatcctgaaaaagggaaagatattgaaggaacacgtgctaaaaaatatgcagagtggcaacctagtacaggtggtttaaaagcaggtatattctcttatgctattgatcgtgatggagtggctcatgttccttcaacatataaaaataggactagtacaaatttacaacggcatgaagtcgataatatctcacatactgactacaccgtatctcgaaaattaaaaacattgatgaccgaagacaaacgctatgatgtcattgatcaaaaagacattcctgacccagcattaagagaacaaatcattcaacaagttggacagtataaaggcgatttggaacgttataacaagacattggtgcttacaggagataagattcaaaatcttaaaggactagaaaaattaagcaagttacaaaaattagagttgcgccagctatctaacgttaaagaaattactccagaacttttgccggaaagcatgaaaaaagatgctgagcttgttatggtaggcatgactggtttagaaaaactaaaccttagtggtctaaatcgtcaaactttagacggtatagacgtgaatagtattacgcatttgacatcatttgatatttcacataatagtttggacttgtcggaaaagagtgaagaccgtaaactattaatgactttgatggagcaggtttcaaatcatcaaaaaataacggtgaaaaatacggcttttgaaaatcaaaaaccgaaaggttattatcctcagacgtatgataccaaagaaggtcattatgatgttgataatgcagaacatgatattttaactgattttgtttttggaactgttactaaacgtaatacctttattggagacgaagaagcatttgctatctataaagaaggagctgtcgatggtcgacaatatgtgtctaaagactatacttatgaagcttttcgtaaagactataaaggttacaaggttcatttaactgcttctaacctaggagaaacagttacttctaaggtaactgctactactgatgaaacttacttagtagatgtttctgatggggaaaaagttgttcaccacatgaaactcaatataggatctggtgccatcatgatggaaaatctggcaaaaggggctaaagtgattggtacatctggggactttgagcaagcaaagaagattttcgatggtgaaaagtcagatagattcttcacttggggacaaactaactggatagcttttgatctaggagaaattaatcttgcgaaggaatggcgtttatttaatgcagagacaaatactgaaataaagacagatagtagcttaaacgtggctaaaggacgtcttcagattttaaaagatacaactattgatttagaaaaaatggacataaaaaatcgtaaagagtatctgtcgaatgatgaaaattggactgatgttgctcagatggatgatgcaaaagcgatatttaatagtaaattatccaatgttttatctcggtattggcggttttgtgtagatggtggagctagctcttattaccctcaatataccgaacttcaaatcctcggacaacgtttatcaaatgatgtcgctaatacgctgaaggattaa

SEQ ID NO: 172 - protein, 1270 aa, Artificial Sequence
  SYNTHETIC FUSION PROTEN
MGSSHHHHHHSSGLVPRGSHMQYQANWQSLDQRPTPAWFEDAKFGIFIHWGLYSVPSWATKSNADGFGSGYSEWYWQRLFAKNLKIHPEFVEFHKKNFGDKNYQDFVQNFKAELFQPNDWANIFEQAGAKYVVLTSKHHEGFTLWPSKESWNWNSVDVGPHRDLAGDLMTAVRAKNLKMGYYYSLYEWFNPVYKADVNTYVSERMLPQMKDLVTRYKPDILWTDGEWDYPAKTWRSEEFLAWLFNESNVKNEIVVNDRWGSDTKSKHGSFATSEYGHGGTDNTETTGGFQRPWEECRGMGESFGYNRNENLDSYQTGEALVHQLIDIVAKGGNLLLNIGPAADGTIPVIMQERLHEIGSWLKVNGSAIYGTRRWSKAPAYTKESTLYFTQKGKNLNAITRKWEETISIQNVAKPSKVTLLGYKGEVKFTYKNGTLTIMAPSVNPSNIPCQYAWTYEIENALGSEEKTVQTGKTDQQVGAKLVQEIREGKRGPLYAGYFRTWHDRASTGIDGKQQHPENTMAEVPKEVDILFVFHDHTASDSPFWSELKDSYVHKLHQQGTALVQTIGVNELNGRTGLSKDYPDTPEGNKALAAAIVKAFVTDRGVDGLDIMIEHEFTNKRTPEEDARALNVFKEIAQLIGKNGSDKSKLLIMDTTLSVENNPIFKGIAEDLDYLLRQYYGSQGGEAEVDTINSDWNQYQNYIDASQFMIGFSFFEESASKGNLWFDVNEYDPNNPEKGKDIEGTRAKKYAEWQPSTGGLKAGIFSYAIDRDGVAHVPSTYKNRTSTNLQRHEVDNISHTDYTVSRKLKTLMTEDKRYDVIDQKDIPDPALREQIIQQVGQYKGDLERYNKTLVLTGDKIQNLKGLEKLSKLQKLELRQLSNVKEITPELLPESMKKDAELVMVGMTGLEKLNLSGLNRQTLDGIDVNSITHLTSFDISHNSLDLSEKSEDRKLLMTLMEQVSNHQKITVKNTAFENQKPKGYYPQTYDTKEGHYDVDNAEHDILTDFVFGTVTKRNTFIGDEEAFAIYKEGAVDGRQYVSKDYTYEAFRKDYKGYKVHLTASNLGETVTSKVTATTDETYLVDVSDGEKVVHHMKLNIGSGAIMMENLAKGAKVIGTSGDFEQAKKIFDGEKSDRFFTWGQTNWIAFDLGEINLAKEWRLFNAETNTEIKTDSSLNVAKGRLQILKDTTIDLEKMDIKNRKEYLSNDENWTDVAQMDDAKAIFNSKLSNVLSRYWRFCVDGGASSYYPQYTELQILGQRLSNDVANTLKD

SEQ ID NO: 173 - DNA, 3024 bp, Artificial Sequence
  SYNTHETIC FUSION PROTEN
atgggcagcagccatcatcatcatcatcacagcagcggcctggtgccgcgcggcagccatatgggtaccctgcagggatccaaagataagtcgtatgatctgattgatgagaaagatttcccagataaggctttgcgagaagctgtgatggcgcaggttggaaccagaaaaggtgatttggaacgtttcaatggcacattacgattggataatccagcgattcaaagtttagaaggtctaaataaatttaaaaaattagctcaattagacttgattggcttatctcgcattacaaagctcgaccgttctgttttacccgctaatatgaagccaggcaaagataccttggaaacagttcttgaaacctataaaaaggataacaaagaagaacctgctactatcccaccagtatctttgaaggtttctggtttaactggtctgaaagaattagatttgtcaggttttgaccgtgaaaccttggctggtcttgatgccgctactctaacgtctttagaaaaagttgatatttctggcaacaaacttgatttggctccaggaacagaaaatcgacaaatttttgatactatgctatcaactatcagcaatcatgttggaagcaatgaacaaacagtgaaatttgacaagcaaaaaccaactgggcattacccagatacctatgggaaaactagtctgcgcttaccagtggcaaatgaaaaagttgatttgcaaagccagcttttgtttgggactgtgacaaatcaaggaaccctaatcaatagcgaagcagactataaggcttaccaaaatcataaaattgctggacgtagctttgttgattcaaactatcattacaataactttaaagtttcttatgagaactataccgttaaagtaactgattccacattgggaaccactactgacaaaacgctagcaactgataaagaagagacctataaggttgacttctttagcccagcagataagacaaaagctgttcatactgctaaagtgattgttggtgacgaaaaaaccatgatggttaatttggcagaaggcgcaacagttattggaggaagtgctgatcctgtaaatgcaagaaaggtatttgatgggcaactgggcagtgagactgataatatctctttaggatgggattctaagcaaagtattatatttaaattgaaagaagatggattaataaagcattggcgtttcttcaatgattcagcccgaaatcctgagacaaccaataaacctattcaggaagcaagtctacaaatttttaatatcaaagattataatctagataatttgttggaaaatcccaataaatttgatgatgaaaaatattggattactgtagatacttacagtgcacaaggagagagagctactgcattcagtaatacattaaataatattactagtaaatattggcgagttgtctttgatactaaaggagatagatatagttcgccagtagtccctgaactccaaattttaggttatccgttacctaacgccgacactatcatgaaaacagtaactactgctaaagagttatctcaacaaaaagataagttttctcaaaagatgcttgatgagttaaaaataaaagagatggctttagaaacttctttgaacagtaagatttttgatgtaactgctattaatgctaatgctggagttttgaaagattgtattgagaaaaggcagctgctaaaaaaaggcggtgcatttagtcagcagaaatatcagccgacccaggcaaatctgaaagcacgtaccgaatttcaggatgaaaaatttggtatgttcatccatttcggcctgtatagcgaactgggtcgtggcgaatgggttatgaataatgataaaattccggttaacgactacgcaaaactgaaagatttttttaacccgattggctttaacgcaaaagaatatgtgagcatggcaaaaaatgcaggtgttaaatatatcaccctggtgacccgtcatcatgatggttttagcatgtggaataccaaatatagcgattttaacatcatgaacaccccgtttaaacgcgatctggttaaagaactggcaaatgaatgccataaacagggcgtgaaaattgccttttattatagcctgctggattggacccgtaccgattatagttattggaccggccgcaccggtaaaggtaccggccgtaccgaaaaaggtaattggaatgattatatccagttcatgaagaatcagctgaccgaactgctgaccaattatggcgaagttagcggtatttggtttgatggctattgggatcagatggaagaagaaaaagccggtcgtagtgaaaaaacctatattgattggaaaatgccggaaatttacgaactgattcataaactgcagccgcagtgtctggtgggtaataatcatcatattaccccgctggaaggcgaagattttcagatgtttgaacgcgatattccgggccagaatgaacatggtctgagttttcagaaaccgagccagctgccgctggaaacctgcgcaaccctgaatgatagttggggctttgatctgaaagataataaaaataagaccttcaaggagttcctgaatctgctggtgaatgccgcaggtagtaatgccaatctgctgatgaatattggcccgatgccgaatggtaaagttccgcagccgtttattaatagctttaaagaaatgggcgagtggattcgcgtttatggtgaaagcatttatggtacccgcggcggttatctgccgctgcagaaatggggcgcagtgacccagaaaagcggtaaaatttatgtgcatattctgaaaaacaacgagggtaaagccattaccctggaaaaatttccgtttaaaaagattaacagcgcatatctgctgaaagataaaaaaaccgtgaaatataccctgaaaaacaataccctgacctttgatagttatgccgttgatgatcagaatccggatgccgtgattgtgtttgaaggcaagtaa

SEQ ID NO: 174 - protein, 1007 aa, Artificial Sequence
  SYNTHETIC FUSION PROTEN
MGSSHHHHHHSSGLVPRGSHMGTLQGSKDKSYDLIDEKDFPDKALREAVMAQVGTRKGDLERFNGTLRLDNPAIQSLEGLNKFKKLAQLDLIGLSRITKLDRSVLPANMKPGKDTLETVLETYKKDNKEEPATIPPVSLKVSGLTGLKELDLSGFDRETLAGLDAATLTSLEKVDISGNKLDLAPGTENRQIFDTMLSTISNHVGSNEQTVKFDKQKPTGHYPDTYGKTSLRLPVANEKVDLQSQLLFGTVTNQGTLINSEADYKAYQNHKIAGRSFVDSNYHYNNFKVSYENYTVKVTDSTLGTTTDKTLATDKEETYKVDFFSPADKTKAVHTAKVIVGDEKTMMVNLAEGATVIGGSADPVNARKVFDGQLGSETDNISLGWDSKQSIIFKLKEDGLIKHWRFFNDSARNPETTNKPIQEASLQIFNIKDYNLDNLLENPNKFDDEKYWITVDTYSAQGERATAFSNTLNNITSKYWRVVFDTKGDRYSSPVVPELQILGYPLPNADTIMKTVTTAKELSQQKDKFSQKMLDELKIKEMALETSLNSKIFDVTAINANAGVLKDCIEKRQLLKKGGAFSQQKYQPTQANLKARTEFQDEKFGMFIHFGLYSELGRGEWVMNNDKIPVNDYAKLKDFFNPIGFNAKEYVSMAKNAGVKYITLVTRHHDGFSMWNTKYSDFNIMNTPFKRDLVKELANECHKQGVKIAFYYSLLDWTRTDYSYWTGRTGKGTGRTEKGNWNDYIQFMKNQLTELLTNYGEVSGIWFDGYWDQMEEEKAGRSEKTYIDWKMPEIYELIHKLQPQCLVGNNHHITPLEGEDFQMFERDIPGQNEHGLSFQKPSQLPLETCATLNDSWGFDLKDNKNKTFKEFLNLLVNAAGSNANLLMNIGPMPNGKVPQPFINSFKEMGEWIRVYGESIYGTRGGYLPLQKWGAVTQKSGKIYVHILKNNEGKAITLEKFPFKKINSAYLLKDKKTVKYTLKNNTLTFDSYAVDDQNPDAVIVFEGK

SEQ ID NO: 175 - DNA, 2751 bp, Artificial Sequence
  SYNTHETIC FUSION PROTEN
atgggcagcagccatcatcatcatcatcacagcagcggcctggtgccgcgcggcagccatatgggtaccctgcagggatccaccgaagacaaacgctatgatgtcattgatcaaaaagacattcctgacccagcattaagagaacaaatcattcaacaagttggacagtataaaggcgatttggaacgttataacaagacattggtgcttacaggagataagattcaaaatcttaaaggactagaaaaattaagcaagttacaaaaattagagttgcgccagctatctaacgttaaagaaattactccagaacttttgccggaaagcatgaaaaaagatgctgagcttgttatggtaggcatgactggtttagaaaaactaaaccttagtggtctaaatcgtcaaactttagacggtatagacgtgaatagtattacgcatttgacatcatttgatatttcacataatagtttggacttgtcggaaaagagtgaagaccgtaaactattaatgactttgatggagcaggtttcaaatcatcaaaaaataacggtgaaaaatacggcttttgaaaatcaaaaaccgaaaggttattatcctcagacgtatgataccaaagaaggtcattatgatgttgataatgcagaacatgatattttaactgattttgtttttggaactgttactaaacgtaatacctttattggagacgaagaagcatttgctatctataaagaaggagctgtcgatggtcgacaatatgtgtctaaagactatacttatgaagcttttcgtaaagactataaaggttacaaggttcatttaactgcttctaacctaggagaaacagttacttctaaggtaactgctactactgatgaaacttacttagtagatgtttctgatggggaaaaagttgttcaccacatgaaactcaatataggatctggtgccatcatgatggaaaatctggcaaaaggggctaaagtgattggtacatctggggactttgagcaagcaaagaagattttcgatggtgaaaagtcagatagattcttcacttggggacaaactaactggatagcttttgatctaggagaaattaatcttgcgaaggaatggcgtttatttaatgcagagacaaatactgaaataaagacagatagtagcttaaacgtggctaaaggacgtcttcagattttaaaagatacaactattgatttagaaaaaatggacataaaaaatcgtaaagagtatctgtcgaatgatgaaaattggactgatgttgctcagatggatgatgcaaaagcgatatttaatagtaaattatccaatgttttatctcggtattggcggttttgtgtagatggtggagctagctcttattaccctcaatataccgaacttcaaatcctcggacaacgtttatcaaatgatgtcgctaatacgctgaaggatggcggtgcatttagtcagcagaaatatcagccgacccaggcaaatctgaaagcacgtaccgaatttcaggatgaaaaatttggtatgttcatccatttcggcctgtatagcgaactgggtcgtggcgaatgggttatgaataatgataaaattccggttaacgactacgcaaaactgaaagatttttttaacccgattggctttaacgcaaaagaatatgtgagcatggcaaaaaatgcaggtgttaaatatatcaccctggtgacccgtcatcatgatggttttagcatgtggaataccaaatatagcgattttaacatcatgaacaccccgtttaaacgcgatctggttaaagaactggcaaatgaatgccataaacagggcgtgaaaattgccttttattatagcctgctggattggacccgtaccgattatagttattggaccggccgcaccggtaaaggtaccggccgtaccgaaaaaggtaattggaatgattatatccagttcatgaagaatcagctgaccgaactgctgaccaattatggcgaagttagcggtatttggtttgatggctattgggatcagatggaagaagaaaaagccggtcgtagtgaaaaaacctatattgattggaaaatgccggaaatttacgaactgattcataaactgcagccgcagtgtctggtgggtaataatcatcatattaccccgctggaaggcgaagattttcagatgtttgaacgcgatattccgggccagaatgaacatggtctgagttttcagaaaccgagccagctgccgctggaaacctgcgcaaccctgaatgatagttggggctttgatctgaaagataataaaaataagaccttcaaggagttcctgaatctgctggtgaatgccgcaggtagtaatgccaatctgctgatgaatattggcccgatgccgaatggtaaagttccgcagccgtttattaatagctttaaagaaatgggcgagtggattcgcgtttatggtgaaagcatttatggtacccgcggcggttatctgccgctgcagaaatggggcgcagtgacccagaaaagcggtaaaatttatgtgcatattctgaaaaacaacgagggtaaagccattaccctggaaaaatttccgtttaaaaagattaacagcgcatatctgctgaaagataaaaaaaccgtgaaatataccctgaaaaacaataccctgacctttgatagttatgccgttgatgatcagaatccggatgccgtgattgtgtttgaaggcaagtaa

SEQ ID NO: 176 - protein, 916 aa, Artificial Sequence
  SYNTHETIC FUSION PROTEN
MGSSHHHHHHSSGLVPRGSHMGTLQGSTEDKRYDVIDQKDIPDPALREQIIQQVGQYKGDLERYNKTLVLTGDKIQNLKGLEKLSKLQKLELRQLSNVKEITPELLPESMKKDAELVMVGMTGLEKLNLSGLNRQTLDGIDVNSITHLTSFDISHNSLDLSEKSEDRKLLMTLMEQVSNHQKITVKNTAFENQKPKGYYPQTYDTKEGHYDVDNAEHDILTDFVFGTVTKRNTFIGDEEAFAIYKEGAVDGRQYVSKDYTYEAFRKDYKGYKVHLTASNLGETVTSKVTATTDETYLVDVSDGEKVVHHMKLNIGSGAIMMENLAKGAKVIGTSGDFEQAKKIFDGEKSDRFFTWGQTNWIAFDLGEINLAKEWRLFNAETNTEIKTDSSLNVAKGRLQILKDTTIDLEKMDIKNRKEYLSNDENWTDVAQMDDAKAIFNSKLSNVLSRYWRFCVDGGASSYYPQYTELQILGQRLSNDVANTLKDGGAFSQQKYQPTQANLKARTEFQDEKFGMFIHFGLYSELGRGEWVMNNDKIPVNDYAKLKDFFNPIGFNAKEYVSMAKNAGVKYITLVTRHHDGFSMWNTKYSDFNIMNTPFKRDLVKELANECHKQGVKIAFYYSLLDWTRTDYSYWTGRTGKGTGRTEKGNWNDYIQFMKNQLTELLTNYGEVSGIWFDGYWDQMEEEKAGRSEKTYIDWKMPEIYELIHKLQPQCLVGNNHHITPLEGEDFQMFERDIPGQNEHGLSFQKPSQLPLETCATLNDSWGFDLKDNKNKTFKEFLNLLVNAAGSNANLLMNIGPMPNGKVPQPFINSFKEMGEWIRVYGESIYGTRGGYLPLQKWGAVTQKSGKIYVHILKNNEGKAITLEKFPFKKINSAYLLKDKKTVKYTLKNNTLTFDSYAVDDQNPDAVIVFEGK

SEQ ID NO: 177 - DNA, 4299 bp, Artificial Sequence
  SYNTHETIC FUSION PROTEN
atgggcagcagccatcatcatcatcatcacagcagcggcctggtgccgcgcggcagccatatgacccaccatgattcactcaatactgtaaaagcggaggagaagactgttcaggttcagaaaggattaccttctatcgatagcttgcattatctgtcagagaatagcaaaaaagaatttaaagaagaactctcaaaagcggggcaagaatctcaaaaggtcaaagagatattagcaaaagctcagcaggcagataaacaagctcaagaacttgccaaaatgaaaattcctgagaaaataccgatgaaaccgttacatggttctctctacggtggttactttagaacttggcatgacaaaacatcagatccaacagaaaaagacaaagttaactcgatgggagagcttcctaaagaagtagatctagcctttattttccacgattggacaaaagattatagccttttttggaaagaattggccaccaaacatgtgccaaagttaaacaagcaagggacacgtgtcattcgtaccattccatggcgtttcctagctgggggtgataacagtggtattgcagaagataccagtaaatacccaaatacaccagagggaaataaagctttagccaaagctattgttgatgaatatgtttataaatacaaccttgatggcttagatgtggatgttgaacatgatagtattccaaaagttgacaaaaaagaagatacagcaggcgtagaacgctctattcaagtgtttgaagaaattgggaaattaattggaccaaaaggtgttgataaatcgcggttatttattatggatagcacctacatggctgataaaaacccattgattgagcgaggagctccttatattaatttattactggtacaggtctatggttcacaaggagagaaaggtggttgggagcctgtttctaatcgacctgaaaaaacaatggaagaacgatggcaaggttatagcaagtatattcgtcctgaacaatacatgattggtttttctttctatgaggaaaatgctcaagaagggaatctttggtatgatattaattctcgcaaggacgaggacaaagcaaatggaattaacactgacataactggaacgcgtgccgaacggtatgcaaggtggcaacctaagacaggtggggttaagggaggtatcttctcctacgctattgaccgagatggtgtagctcatcaacctaaaaaatatgctaaacagaaagagtttaaggacgcaactgataacatcttccactcagattatagtgtctccaaggcattaaagacagttatgctaaaagataagtcgtatgatctgattgatgagaaagatttcccagataaggctttgcgagaagctgtgatggcgcaggttggaaccagaaaaggtgatttggaacgtttcaatggcacattacgattggataatccagcgattcaaagtttagaaggtctaaataaatttaaaaaattagctcaattagacttgattggcttatctcgcattacaaagctcgaccgttctgttttacccgctaatatgaagccaggcaaagataccttggaaacagttcttgaaacctataaaaaggataacaaagaagaacctgctactatcccaccagtatctttgaaggtttctggtttaactggtctgaaagaattagatttgtcaggttttgaccgtgaaaccttggctggtcttgatgccgctactctaacgtctttagaaaaagttgatatttctggcaacaaacttgatttggctccaggaacagaaaatcgacaaatttttgatactatgctatcaactatcagcaatcatgttggaagcaatgaacaaacagtgaaatttgacaagcaaaaaccaactgggcattacccagatacctatgggaaaactagtctgcgcttaccagtggcaaatgaaaaagttgatttgcaaagccagcttttgtttgggactgtgacaaatcaaggaaccctaatcaatagcgaagcagactataaggcttaccaaaatcataaaattgctggacgtagctttgttgattcaaactatcattacaataactttaaagtttcttatgagaactataccgttaaagtaactgattccacattgggaaccactactgacaaaacgctagcaactgataaagaagagacctataaggttgacttctttagcccagcagataagacaaaagctgttcatactgctaaagtgattgttggtgacgaaaaaaccatgatggttaatttggcagaaggcgcaacagttattggaggaagtgctgatcctgtaaatgcaagaaaggtatttgatgggcaactgggcagtgagactgataatatctctttaggatgggattctaagcaaagtattatatttaaattgaaagaagatggattaataaagcattggcgtttcttcaatgattcagcccgaaatcctgagacaaccaataaacctattcaggaagcaagtctacaaatttttaatatcaaagattataatctagataatttgttggaaaatcccaataaatttgatgatgaaaaatattggattactgtagatacttacagtgcacaaggagagagagctactgcattcagtaatacattaaataatattactagtaaatattggcgagttgtctttgatactaaaggagatagatatagttcgccagtagtccctgaactccaaattttaggttatccgttacctaacgccgacactatcatgaaaacagtaactactgctaaagagttatctcaacaaaaagataagttttctcaaaagatgcttgatgagttaaaaataaaagagatggctttagaaacttctttgaacagtaagatttttgatgtaactgctattaatgctaatgctggagttttgaaagattgtattgagaaaaggcagctgctaaaaaaaggatccggtgcttttagtcagcagaaatatcagccgacccaggcaaatctgaaagcacgtaccgaatttcaggatgaaaaatttggtatgttcatccatttcggcctgtatagcgaactgggtcgtggcgaatgggttatgaataatgataaaattccggttaacgactacgcaaaactgaaagatttttttaacccgattggctttaacgcaaaagaatatgtgagcatggcaaaaaatgcaggtgttaaatatatcaccctggtgacccgtcatcatgatggttttagcatgtggaataccaaatatagcgattttaacatcatgaacaccccgtttaaacgcgatctggttaaagaactggcaaatgaatgccataaacagggcgtgaaaattgccttttattatagcctgctggattggacccgtaccgattatagttattggaccggccgcaccggtaaaggtaccggccgtaccgaaaaaggtaattggaatgattatatccagttcatgaagaatcagctgaccgaactgctgaccaattatggcgaagttagcggtatttggtttgatggctattgggatcagatggaagaagaaaaagccggtcgtagtgaaaaaacctatattgattggaaaatgccggaaatttacgaactgattcataaactgcagccgcagtgtctggtgggtaataatcatcatattaccccgctggaaggcgaagattttcagatgtttgaacgcgatattccgggccagaatgaacatggtctgagttttcagaaaccgagccagctgccgctggaaacctgcgcaaccctgaatgatagttggggctttgatctgaaagataataaaaataagaccttcaaggagttcctgaatctgctggtgaatgccgcaggtagtaatgccaatctgctgatgaatattggcccgatgccgaatggtaaagttccgcagccgtttattaatagctttaaagaaatgggcgagtggattcgcgtttatggtgaaagcatttatggtacccgcggcggttatctgccgctgcagaaatggggcgcagtgacccagaaaagcggtaaaatttatgtgcatattctgaaaaacaacgagggtaaagccattaccctggaaaaatttccgtttaaaaagattaacagcgcatatctgctgaaagataaaaaaaccgtgaaatataccctgaaaaacaataccctgacctttgatagttatgccgttgatgatcagaatccggatgccgtgattgtgtttgaaggcaagggtacctggtctcatccgcagttcgagaaataa

SEQ ID NO: 178 - protein, 1432 aa, Artificial Sequence
  SYNTHETIC FUSION PROTEN
MGSSHHHHHHSSGLVPRGSHMTHHDSLNTVKAEEKTVQVQKGLPSIDSLHYLSENSKKEFKEELSKAGQESQKVKEILAKAQQADKQAQELAKMKIPEKIPMKPLHGSLYGGYFRTWHDKTSDPTEKDKVNSMGELPKEVDLAFIFHDWTKDYSLFWKELATKHVPKLNKQGTRVIRTIPWRFLAGGDNSGIAEDTSKYPNTPEGNKALAKAIVDEYVYKYNLDGLDVDVEHDSIPKVDKKEDTAGVERSIQVFEEIGKLIGPKGVDKSRLFIMDSTYMADKNPLIERGAPYINLLLVQVYGSQGEKGGWEPVSNRPEKTMEERWQGYSKYIRPEQYMIGFSFYEENAQEGNLWYDINSRKDEDKANGINTDITGTRAERYARWQPKTGGVKGGIFSYAIDRDGVAHQPKKYAKQKEFKDATDNIFHSDYSVSKALKTVMLKDKSYDLIDEKDFPDKALREAVMAQVGTRKGDLERFNGTLRLDNPAIQSLEGLNKFKKLAQLDLIGLSRITKLDRSVLPANMKPGKDTLETVLETYKKDNKEEPATIPPVSLKVSGLTGLKELDLSGFDRETLAGLDAATLTSLEKVDISGNKLDLAPGTENRQIFDTMLSTISNHVGSNEQTVKFDKQKPTGHYPDTYGKTSLRLPVANEKVDLQSQLLFGTVTNQGTLINSEADYKAYQNHKIAGRSFVDSNYHYNNFKVSYENYTVKVTDSTLGTTTDKTLATDKEETYKVDFFSPADKTKAVHTAKVIVGDEKTMMVNLAEGATVIGGSADPVNARKVFDGQLGSETDNISLGWDSKQSIIFKLKEDGLIKHWRFFNDSARNPETTNKPIQEASLQIFNIKDYNLDNLLENPNKFDDEKYWITVDTYSAQGERATAFSNTLNNITSKYWRVVFDTKGDRYSSPVVPELQILGYPLPNADTIMKTVTTAKELSQQKDKFSQKMLDELKIKEMALETSLNSKIFDVTAINANAGVLKDCIEKRQLLKKGSGAFSQQKYQPTQANLKARTEFQDEKFGMFIHFGLYSELGRGEWVMNNDKIPVNDYAKLKDFFNPIGFNAKEYVSMAKNAGVKYITLVTRHHDGFSMWNTKYSDFNIMNTPFKRDLVKELANECHKQGVKIAFYYSLLDWTRTDYSYWTGRTGKGTGRTEKGNWNDYIQFMKNQLTELLTNYGEVSGIWFDGYWDQMEEEKAGRSEKTYIDWKMPEIYELIHKLQPQCLVGNNHHITPLEGEDFQMFERDIPGQNEHGLSFQKPSQLPLETCATLNDSWGFDLKDNKNKTFKEFLNLLVNAAGSNANLLMNIGPMPNGKVPQPFINSFKEMGEWIRVYGESIYGTRGGYLPLQKWGAVTQKSGKIYVHILKNNEGKAITLEKFPFKKINSAYLLKDKKTVKYTLKNNTLTFDSYAVDDQNPDAVIVFEGKGTWSHPQFEK

SEQ ID NO: 179 - DNA, 4299 bp, Artificial Sequence
  SYNTHETIC FUSION PROTEN
atgggcagcagccatcatcatcatcatcacagcagcggcctggtgccgcgcggcagccatatgacccaccatgattcactcaatactgtaaaagcggaggagaagactgttcaggttcagaaaggattaccttctatcgatagcttgcattatctgtcagagaatagcaaaaaagaatttaaagaagaactctcaaaagcggggcaagaatctcaaaaggtcaaagagatattagcaaaagctcagcaggcagataaacaagctcaagaacttgccaaaatgaaaattcctgagaaaataccgatgaaaccgttacatggttctctctacggtggttactttagaacttggcatgacaaaacatcagatccaacagaaaaagacaaagttaactcgatgggagagcttcctaaagaagtagatctagcctttattttccacgattggacaaaagattatagccttttttggaaagaattggccaccaaacatgtgccaaagttaaacaagcaagggacacgtgtcattcgtaccattccatggcgtttcctagctgggggtgataacagtggtattgcagaagataccagtaaatacccaaatacaccagagggaaataaagctttagccaaagctattgttgatgaatatgtttataaatacaaccttgatggcttagatgtgcaggttgaacatgatagtattccaaaagttgacaaaaaagaagatacagcaggcgtagaacgctctattcaagtgtttgaagaaattgggaaattaattggaccaaaaggtgttgataaatcgcggttatttattatggatagcacctacatggctgataaaaacccattgattgagcgaggagctccttatattaatttattactggtacaggtctatggttcacaaggagagaaaggtggttgggagcctgtttctaatcgacctgaaaaaacaatggaagaacgatggcaaggttatagcaagtatattcgtcctgaacaatacatgattggtttttctttctatgaggaaaatgctcaagaagggaatctttggtatgatattaattctcgcaaggacgaggacaaagcaaatggaattaacactgacataactggaacgcgtgccgaacggtatgcaaggtggcaacctaagacaggtggggttaagggaggtatcttctcctacgctattgaccgagatggtgtagctcatcaacctaaaaaatatgctaaacagaaagagtttaaggacgcaactgataacatcttccactcagattatagtgtctccaaggcattaaagacagttatgctaaaagataagtcgtatgatctgattgatgagaaagatttcccagataaggctttgcgagaagctgtgatggcgcaggttggaaccagaaaaggtgatttggaacgtttcaatggcacattacgattggataatccagcgattcaaagtttagaaggtctaaataaatttaaaaaattagctcaattagacttgattggcttatctcgcattacaaagctcgaccgttctgttttacccgctaatatgaagccaggcaaagataccttggaaacagttcttgaaacctataaaaaggataacaaagaagaacctgctactatcccaccagtatctttgaaggtttctggtttaactggtctgaaagaattagatttgtcaggttttgaccgtgaaaccttggctggtcttgatgccgctactctaacgtctttagaaaaagttgatatttctggcaacaaacttgatttggctccaggaacagaaaatcgacaaatttttgatactatgctatcaactatcagcaatcatgttggaagcaatgaacaaacagtgaaatttgacaagcaaaaaccaactgggcattacccagatacctatgggaaaactagtctgcgcttaccagtggcaaatgaaaaagttgatttgcaaagccagcttttgtttgggactgtgacaaatcaaggaaccctaatcaatagcgaagcagactataaggcttaccaaaatcataaaattgctggacgtagctttgttgattcaaactatcattacaataactttaaagtttcttatgagaactataccgttaaagtaactgattccacattgggaaccactactgacaaaacgctagcaactgataaagaagagacctataaggttgacttctttagcccagcagataagacaaaagctgttcatactgctaaagtgattgttggtgacgaaaaaaccatgatggttaatttggcagaaggcgcaacagttattggaggaagtgctgatcctgtaaatgcaagaaaggtatttgatgggcaactgggcagtgagactgataatatctctttaggatgggattctaagcaaagtattatatttaaattgaaagaagatggattaataaagcattggcgtttcttcaatgattcagcccgaaatcctgagacaaccaataaacctattcaggaagcaagtctacaaatttttaatatcaaagattataatctagataatttgttggaaaatcccaataaatttgatgatgaaaaatattggattactgtagatacttacagtgcacaaggagagagagctactgcattcagtaatacattaaataatattactagtaaatattggcgagttgtctttgatactaaaggagatagatatagttcgccagtagtccctgaactccaaattttaggttatccgttacctaacgccgacactatcatgaaaacagtaactactgctaaagagttatctcaacaaaaagataagttttctcaaaagatgcttgatgagttaaaaataaaagagatggctttagaaacttctttgaacagtaagatttttgatgtaactgctattaatgctaatgctggagttttgaaagattgtattgagaaaaggcagctgctaaaaaaaggatccggtgcttttagtcagcagaaatatcagccgacccaggcaaatctgaaagcacgtaccgaatttcaggatgaaaaatttggtatgttcatccatttcggcctgtatagcgaactgggtcgtggcgaatgggttatgaataatgataaaattccggttaacgactacgcaaaactgaaagatttttttaacccgattggctttaacgcaaaagaatatgtgagcatggcaaaaaatgcaggtgttaaatatatcaccctggtgacccgtcatcatgatggttttagcatgtggaataccaaatatagcgattttaacatcatgaacaccccgtttaaacgcgatctggttaaagaactggcaaatgaatgccataaacagggcgtgaaaattgccttttattatagcctgctggattggacccgtaccgattatagttattggaccggccgcaccggtaaaggtaccggccgtaccgaaaaaggtaattggaatgattatatccagttcatgaagaatcagctgaccgaactgctgaccaattatggcgaagttagcggtatttggtttgatggctattgggatcagatggaagaagaaaaagccggtcgtagtgaaaaaacctatattgattggaaaatgccggaaatttacgaactgattcataaactgcagccgcagtgtctggtgggtaataatcatcatattaccccgctggaaggcgaagattttcagatgtttgaacgcgatattccgggccagaatgaacatggtctgagttttcagaaaccgagccagctgccgctggaaacctgcgcaaccctgaatgatagttggggctttgatctgaaagataataaaaataagaccttcaaggagttcctgaatctgctggtgaatgccgcaggtagtaatgccaatctgctgatgaatattggcccgatgccgaatggtaaagttccgcagccgtttattaatagctttaaagaaatgggcgagtggattcgcgtttatggtgaaagcatttatggtacccgcggcggttatctgccgctgcagaaatggggcgcagtgacccagaaaagcggtaaaatttatgtgcatattctgaaaaacaacgagggtaaagccattaccctggaaaaatttccgtttaaaaagattaacagcgcatatctgctgaaagataaaaaaaccgtgaaatataccctgaaaaacaataccctgacctttgatagttatgccgttgatgatcagaatccggatgccgtgattgtgtttgaaggcaagggtacctggtctcatccgcagttcgagaaataa

SEQ ID NO: 180 - protein, 1432 aa, Artificial Sequence
  SYNTHETIC FUSION PROTEN
MGSSHHHHHHSSGLVPRGSHMTHHDSLNTVKAEEKTVQVQKGLPSIDSLHYLSENSKKEFKEELSKAGQESQKVKEILAKAQQADKQAQELAKMKIPEKIPMKPLHGSLYGGYFRTWHDKTSDPTEKDKVNSMGELPKEVDLAFIFHDWTKDYSLFWKELATKHVPKLNKQGTRVIRTIPWRFLAGGDNSGIAEDTSKYPNTPEGNKALAKAIVDEYVYKYNLDGLDVQVEHDSIPKVDKKEDTAGVERSIQVFEEIGKLIGPKGVDKSRLFIMDSTYMADKNPLIERGAPYINLLLVQVYGSQGEKGGWEPVSNRPEKTMEERWQGYSKYIRPEQYMIGFSFYEENAQEGNLWYDINSRKDEDKANGINTDITGTRAERYARWQPKTGGVKGGIFSYAIDRDGVAHQPKKYAKQKEFKDATDNIFHSDYSVSKALKTVMLKDKSYDLIDEKDFPDKALREAVMAQVGTRKGDLERFNGTLRLDNPAIQSLEGLNKFKKLAQLDLIGLSRITKLDRSVLPANMKPGKDTLETVLETYKKDNKEEPATIPPVSLKVSGLTGLKELDLSGFDRETLAGLDAATLTSLEKVDISGNKLDLAPGTENRQIFDTMLSTISNHVGSNEQTVKFDKQKPTGHYPDTYGKTSLRLPVANEKVDLQSQLLFGTVTNQGTLINSEADYKAYQNHKIAGRSFVDSNYHYNNFKVSYENYTVKVTDSTLGTTTDKTLATDKEETYKVDFFSPADKTKAVHTAKVIVGDEKTMMVNLAEGATVIGGSADPVNARKVFDGQLGSETDNISLGWDSKQSIIFKLKEDGLIKHWRFFNDSARNPETTNKPIQEASLQIFNIKDYNLDNLLENPNKFDDEKYWITVDTYSAQGERATAFSNTLNNITSKYWRVVFDTKGDRYSSPVVPELQILGYPLPNADTIMKTVTTAKELSQQKDKFSQKMLDELKIKEMALETSLNSKIFDVTAINANAGVLKDCIEKRQLLKKGSGAFSQQKYQPTQANLKARTEFQDEKFGMFIHFGLYSELGRGEWVMNNDKIPVNDYAKLKDFFNPIGFNAKEYVSMAKNAGVKYITLVTRHHDGFSMWNTKYSDFNIMNTPFKRDLVKELANECHKQGVKIAFYYSLLDWTRTDYSYWTGRTGKGTGRTEKGNWNDYIQFMKNQLTELLTNYGEVSGIWFDGYWDQMEEEKAGRSEKTYIDWKMPEIYELIHKLQPQCLVGNNHHITPLEGEDFQMFERDIPGQNEHGLSFQKPSQLPLETCATLNDSWGFDLKDNKNKTFKEFLNLLVNAAGSNANLLMNIGPMPNGKVPQPFINSFKEMGEWIRVYGESIYGTRGGYLPLQKWGAVTQKSGKIYVHILKNNEGKAITLEKFPFKKINSAYLLKDKKTVKYTLKNNTLTFDSYAVDDQNPDAVIVFEGKGTWSHPQFEK

SEQ ID NO: 181 - DNA, 3810 bp, Artificial Sequence
  SYNTHETIC FUSION PROTEN
atgggcagcagccatcatcatcatcatcacagcagcggcctggtgccgcgcggcagccatatggaggagaagactgttcaaacaggaaagacagatcagcaggttggtgctaaattggtacaggaaatccgtgaaggaaaacgcggaccactatatgctggttattttaggacatggcatgatcgtgcttcaacaggaatagatggtaaacagcaacatccagaaaatactatggctgaggtcccaaaagaagttgatatcttatttgtttttcatgaccatacagcttcagatagtccattttggtctgaattaaaggacagttatgtccataaattacatcaacagggaacggcacttgttcagacaattggtgttaacgaattaaatggacgtacaggtttatctaaagattatcctgatactcctgaggggaacaaagctttagcagcagccattgtcaaggcatttgtaactgatcgtggtgtcgatggactagatattgatattgagcacgaatttacgaacaaaagaacacctgaagaagatgctcgtgctctaaatgtttttaaagagattgcgcagttaataggtaaaaatggtagtgataaatctaaattgctcatcatggacactaccctaagtgttgaaaataatccaatatttaaagggatagcggaagatcttgattatcttcttagacaatattatggttcacaaggtggagaagctgaagtggatactataaactctgattggaaccaatatcagaattatattgatgctagccagttcatgattggattctccttttttgaagaatctgcgtccaaagggaatttatggtttgatgttaacgaatacgaccctaacaatcctgaaaaagggaaagatattgaaggaacacgtgctaaaaaatatgcagagtggcaacctagtacaggtggtttaaaagcaggtatattctcttatgctattgatcgtgatggagtggctcatgttccttcaacatataaaaataggactagtacaaatttacaacggcatgaagtcgataatatctcacatactgactacaccgtatctcgaaaattaaaaacattgatgaccgaagacaaacgctatgatgtcattgatcaaaaagacattcctgacccagcattaagagaacaaatcattcaacaagttggacagtataaaggcgatttggaacgttataacaagacattggtgcttacaggagataagattcaaaatcttaaaggactagaaaaattaagcaagttacaaaaattagagttgcgccagctatctaacgttaaagaaattactccagaacttttgccggaaagcatgaaaaaagatgctgagcttgttatggtaggcatgactggtttagaaaaactaaaccttagtggtctaaatcgtcaaactttagacggtatagacgtgaatagtattacgcatttgacatcatttgatatttcacataatagtttggacttgtcggaaaagagtgaagaccgtaaactattaatgactttgatggagcaggtttcaaatcatcaaaaaataacggtgaaaaatacggcttttgaaaatcaaaaaccgaaaggttattatcctcagacgtatgataccaaagaaggtcattatgatgttgataatgcagaacatgatattttaactgattttgtttttggaactgttactaaacgtaatacctttattggagacgaagaagcatttgctatctataaagaaggagctgtcgatggtcgacaatatgtgtctaaagactatacttatgaagcttttcgtaaagactataaaggttacaaggttcatttaactgcttctaacctaggagaaacagttacttctaaggtaactgctactactgatgaaacttacttagtagatgtttctgatggggaaaaagttgttcaccacatgaaactcaatataggatctggtgccatcatgatggaaaatctggcaaaaggggctaaagtgattggtacatctggggactttgagcaagcaaagaagattttcgatggtgaaaagtcagatagattcttcacttggggacaaactaactggatagcttttgatctaggagaaattaatcttgcgaaggaatggcgtttatttaatgcagagacaaatactgaaataaagacagatagtagcttaaacgtggctaaaggacgtcttcagattttaaaagatacaactattgatttagaaaaaatggacataaaaaatcgtaaagagtatctgtcgaatgatgaaaattggactgatgttgctcagatggatgatgcaaaagcgatatttaatagtaaattatccaatgttttatctcggtattggcggttttgtgtagatggtggagctagctcttattaccctcaatataccgaacttcaaatcctcggacaacgtttatcaaatgatgtcgctaatacgctgaaggatggatccggtgcttttagtcagcagaaatatcagccgacccaggcaaatctgaaagcacgtaccgaatttcaggatgaaaaatttggtatgttcatccatttcggcctgtatagcgaactgggtcgtggcgaatgggttatgaataatgataaaattccggttaacgactacgcaaaactgaaagatttttttaacccgattggctttaacgcaaaagaatatgtgagcatggcaaaaaatgcaggtgttaaatatatcaccctggtgacccgtcatcatgatggttttagcatgtggaataccaaatatagcgattttaacatcatgaacaccccgtttaaacgcgatctggttaaagaactggcaaatgaatgccataaacagggcgtgaaaattgccttttattatagcctgctggattggacccgtaccgattatagttattggaccggccgcaccggtaaaggtaccggccgtaccgaaaaaggtaattggaatgattatatccagttcatgaagaatcagctgaccgaactgctgaccaattatggcgaagttagcggtatttggtttgatggctattgggatcagatggaagaagaaaaagccggtcgtagtgaaaaaacctatattgattggaaaatgccggaaatttacgaactgattcataaactgcagccgcagtgtctggtgggtaataatcatcatattaccccgctggaaggcgaagattttcagatgtttgaacgcgatattccgggccagaatgaacatggtctgagttttcagaaaccgagccagctgccgctggaaacctgcgcaaccctgaatgatagttggggctttgatctgaaagataataaaaataagaccttcaaggagttcctgaatctgctggtgaatgccgcaggtagtaatgccaatctgctgatgaatattggcccgatgccgaatggtaaagttccgcagccgtttattaatagctttaaagaaatgggcgagtggattcgcgtttatggtgaaagcatttatggtacccgcggcggttatctgccgctgcagaaatggggcgcagtgacccagaaaagcggtaaaatttatgtgcatattctgaaaaacaacgagggtaaagccattaccctggaaaaatttccgtttaaaaagattaacagcgcatatctgctgaaagataaaaaaaccgtgaaatataccctgaaaaacaataccctgacctttgatagttatgccgttgatgatcagaatccggatgccgtgattgtgtttgaaggcaagagtacctggtctcatccgcagttcgagaaataa

SEQ ID NO: 182 - protein, 1269 aa, Artificial Sequence
  SYNTHETIC FUSION PROTEN
MGSSHHHHHHSSGLVPRGSHMEEKTVQTGKTDQQVGAKLVQEIREGKRGPLYAGYFRTWHDRASTGIDGKQQHPENTMAEVPKEVDILFVFHDHTASDSPFWSELKDSYVHKLHQQGTALVQTIGVNELNGRTGLSKDYPDTPEGNKALAAAIVKAFVTDRGVDGLDIDIEHEFTNKRTPEEDARALNVFKEIAQLIGKNGSDKSKLLIMDTTLSVENNPIFKGIAEDLDYLLRQYYGSQGGEAEVDTINSDWNQYQNYIDASQFMIGFSFFEESASKGNLWFDVNEYDPNNPEKGKDIEGTRAKKYAEWQPSTGGLKAGIFSYAIDRDGVAHVPSTYKNRTSTNLQRHEVDNISHTDYTVSRKLKTLMTEDKRYDVIDQKDIPDPALREQIIQQVGQYKGDLERYNKTLVLTGDKIQNLKGLEKLSKLQKLELRQLSNVKEITPELLPESMKKDAELVMVGMTGLEKLNLSGLNRQTLDGIDVNSITHLTSFDISHNSLDLSEKSEDRKLLMTLMEQVSNHQKITVKNTAFENQKPKGYYPQTYDTKEGHYDVDNAEHDILTDFVFGTVTKRNTFIGDEEAFAIYKEGAVDGRQYVSKDYTYEAFRKDYKGYKVHLTASNLGETVTSKVTATTDETYLVDVSDGEKVVHHMKLNIGSGAIMMENLAKGAKVIGTSGDFEQAKKIFDGEKSDRFFTWGQTNWIAFDLGEINLAKEWRLFNAETNTEIKTDSSLNVAKGRLQILKDTTIDLEKMDIKNRKEYLSNDENWTDVAQMDDAKAIFNSKLSNVLSRYWRFCVDGGASSYYPQYTELQILGQRLSNDVANTLKDGSGAFSQQKYQPTQANLKARTEFQDEKFGMFIHFGLYSELGRGEWVMNNDKIPVNDYAKLKDFFNPIGFNAKEYVSMAKNAGVKYITLVTRHHDGFSMWNTKYSDFNIMNTPFKRDLVKELANECHKQGVKIAFYYSLLDWTRTDYSYWTGRTGKGTGRTEKGNWNDYIQFMKNQLTELLTNYGEVSGIWFDGYWDQMEEEKAGRSEKTYIDWKMPEIYELIHKLQPQCLVGNNHHITPLEGEDFQMFERDIPGQNEHGLSFQKPSQLPLETCATLNDSWGFDLKDNKNKTFKEFLNLLVNAAGSNANLLMNIGPMPNGKVPQPFINSFKEMGEWIRVYGESIYGTRGGYLPLQKWGAVTQKSGKIYVHILKNNEGKAITLEKFPFKKINSAYLLKDKKTVKYTLKNNTLTFDSYAVDDQNPDAVIVFEGKSTWSHPQFEK

SEQ ID NO: 183 - DNA, 3810 bp, Artificial Sequence
  SYNTHETIC FUSION PROTEN
atgggcagcagccatcatcatcatcatcacagcagcggcctggtgccgcgcggcagccatatggaggagaagactgttcaaacaggaaagacagatcagcaggttggtgctaaattggtacaggaaatccgtgaaggaaaacgcggaccactatatgctggttattttaggacatggcatgatcgtgcttcaacaggaatagatggtaaacagcaacatccagaaaatactatggctgaggtcccaaaagaagttgatatcttatttgtttttcatgaccatacagcttcagatagtccattttggtctgaattaaaggacagttatgtccataaattacatcaacagggaacggcacttgttcaggaaattggtgttaacgaattaaatggacgtacaggtttatctaaagattatcctgatactcctgaggggaacaaagctttagcagcagccattgtcaaggcatttgtaactgatcgtggtgtcgatggactagatattgatattgagcacgaatttacgaacaaaagaacacctgaagaagatgctcgtgctctaaatgtttttaaagagattgcgcagttaataggtaaaaatggtagtgataaatctaaattgctcatcatggacactaccctaagtgttgaaaataatccaatatttaaagggatagcggaagatcttgattatcttcttagacaatattatggttcacaaggtggagaagctgaagtggatactataaactctgattggaaccaatatcagaattatattgatgctagccagttcatgattggattctccttttttgaagaatctgcgtccaaagggaatttatggtttgatgttaacgaatacgaccctaacaatcctgaaaaagggaaagatattgaaggaacacgtgctaaaaaatatgcagagtggcaacctagtacaggtggtttaaaagcaggtatattctcttatgctattgatcgtgatggagtggctcatgttccttcaacatataaaaataggactagtacaaatttacaacggcatgaagtcgataatatctcacatactgactacaccgtatctcgaaaattaaaaacattgatgaccgaagacaaacgctatgatgtcattgatcaaaaagacattcctgacccagcattaagagaacaaatcattcaacaagttggacagtataaaggcgatttggaacgttataacaagacattggtgcttacaggagataagattcaaaatcttaaaggactagaaaaattaagcaagttacaaaaattagagttgcgccagctatctaacgttaaagaaattactccagaacttttgccggaaagcatgaaaaaagatgctgagcttgttatggtaggcatgactggtttagaaaaactaaaccttagtggtctaaatcgtcaaactttagacggtatagacgtgaatagtattacgcatttgacatcatttgatatttcacataatagtttggacttgtcggaaaagagtgaagaccgtaaactattaatgactttgatggagcaggtttcaaatcatcaaaaaataacggtgaaaaatacggcttttgaaaatcaaaaaccgaaaggttattatcctcagacgtatgataccaaagaaggtcattatgatgttgataatgcagaacatgatattttaactgattttgtttttggaactgttactaaacgtaatacctttattggagacgaagaagcatttgctatctataaagaaggagctgtcgatggtcgacaatatgtgtctaaagactatacttatgaagcttttcgtaaagactataaaggttacaaggttcatttaactgcttctaacctaggagaaacagttacttctaaggtaactgctactactgatgaaacttacttagtagatgtttctgatggggaaaaagttgttcaccacatgaaactcaatataggatctggtgccatcatgatggaaaatctggcaaaaggggctaaagtgattggtacatctggggactttgagcaagcaaagaagattttcgatggtgaaaagtcagatagattcttcacttggggacaaactaactggatagcttttgatctaggagaaattaatcttgcgaaggaatggcgtttatttaatgcagagacaaatactgaaataaagacagatagtagcttaaacgtggctaaaggacgtcttcagattttaaaagatacaactattgatttagaaaaaatggacataaaaaatcgtaaagagtatctgtcgaatgatgaaaattggactgatgttgctcagatggatgatgcaaaagcgatatttaatagtaaattatccaatgttttatctcggtattggcggttttgtgtagatggtggagctagctcttattaccctcaatataccgaacttcaaatcctcggacaacgtttatcaaatgatgtcgctaatacgctgaaggatggatccggtgcttttagtcagcagaaatatcagccgacccaggcaaatctgaaagcacgtaccgaatttcaggatgaaaaatttggtatgttcatccatttcggcctgtatagcgaactgggtcgtggcgaatgggttatgaataatgataaaattccggttaacgactacgcaaaactgaaagatttttttaacccgattggctttaacgcaaaagaatatgtgagcatggcaaaaaatgcaggtgttaaatatatcaccctggtgacccgtcatcatgatggttttagcatgtggaataccaaatatagcgattttaacatcatgaacaccccgtttaaacgcgatctggttaaagaactggcaaatgaatgccataaacagggcgtgaaaattgccttttattatagcctgctggattggacccgtaccgattatagttattggaccggccgcaccggtaaaggtaccggccgtaccgaaaaaggtaattggaatgattatatccagttcatgaagaatcagctgaccgaactgctgaccaattatggcgaagttagcggtatttggtttgatggctattgggatcagatggaagaagaaaaagccggtcgtagtgaaaaaacctatattgattggaaaatgccggaaatttacgaactgattcataaactgcagccgcagtgtctggtgggtaataatcatcatattaccccgctggaaggcgaagattttcagatgtttgaacgcgatattccgggccagaatgaacatggtctgagttttcagaaaccgagccagctgccgctggaaacctgcgcaaccctgaatgatagttggggctttgatctgaaagataataaaaataagaccttcaaggagttcctgaatctgctggtgaatgccgcaggtagtaatgccaatctgctgatgaatattggcccgatgccgaatggtaaagttccgcagccgtttattaatagctttaaagaaatgggcgagtggattcgcgtttatggtgaaagcatttatggtacccgcggcggttatctgccgctgcagaaatggggcgcagtgacccagaaaagcggtaaaatttatgtgcatattctgaaaaacaacgagggtaaagccattaccctggaaaaatttccgtttaaaaagattaacagcgcatatctgctgaaagataaaaaaaccgtgaaatataccctgaaaaacaataccctgacctttgatagttatgccgttgatgatcagaatccggatgccgtgattgtgtttgaaggcaagagtacctggtctcatccgcagttcgagaaataa

SEQ ID NO: 184 - protein, 1269 aa, Artificial Sequence
  SYNTHETIC FUSION PROTEN
MGSSHHHHHHSSGLVPRGSHMEEKTVQTGKTDQQVGAKLVQEIREGKRGPLYAGYFRTWHDRASTGIDGKQQHPENTMAEVPKEVDILFVFHDHTASDSPFWSELKDSYVHKLHQQGTALVQEIGVNELNGRTGLSKDYPDTPEGNKALAAAIVKAFVTDRGVDGLDIDIEHEFTNKRTPEEDARALNVFKEIAQLIGKNGSDKSKLLIMDTTLSVENNPIFKGIAEDLDYLLRQYYGSQGGEAEVDTINSDWNQYQNYIDASQFMIGFSFFEESASKGNLWFDVNEYDPNNPEKGKDIEGTRAKKYAEWQPSTGGLKAGIFSYAIDRDGVAHVPSTYKNRTSTNLQRHEVDNISHTDYTVSRKLKTLMTEDKRYDVIDQKDIPDPALREQIIQQVGQYKGDLERYNKTLVLTGDKIQNLKGLEKLSKLQKLELRQLSNVKEITPELLPESMKKDAELVMVGMTGLEKLNLSGLNRQTLDGIDVNSITHLTSFDISHNSLDLSEKSEDRKLLMTLMEQVSNHQKITVKNTAFENQKPKGYYPQTYDTKEGHYDVDNAEHDILTDFVFGTVTKRNTFIGDEEAFAIYKEGAVDGRQYVSKDYTYEAFRKDYKGYKVHLTASNLGETVTSKVTATTDETYLVDVSDGEKVVHHMKLNIGSGAIMMENLAKGAKVIGTSGDFEQAKKIFDGEKSDRFFTWGQTNWIAFDLGEINLAKEWRLFNAETNTEIKTDSSLNVAKGRLQILKDTTIDLEKMDIKNRKEYLSNDENWTDVAQMDDAKAIFNSKLSNVLSRYWRFCVDGGASSYYPQYTELQILGQRLSNDVANTLKDGSGAFSQQKYQPTQANLKARTEFQDEKFGMFIHFGLYSELGRGEWVMNNDKIPVNDYAKLKDFFNPIGFNAKEYVSMAKNAGVKYITLVTRHHDGFSMWNTKYSDFNIMNTPFKRDLVKELANECHKQGVKIAFYYSLLDWTRTDYSYWTGRTGKGTGRTEKGNWNDYIQFMKNQLTELLTNYGEVSGIWFDGYWDQMEEEKAGRSEKTYIDWKMPEIYELIHKLQPQCLVGNNHHITPLEGEDFQMFERDIPGQNEHGLSFQKPSQLPLETCATLNDSWGFDLKDNKNKTFKEFLNLLVNAAGSNANLLMNIGPMPNGKVPQPFINSFKEMGEWIRVYGESIYGTRGGYLPLQKWGAVTQKSGKIYVHILKNNEGKAITLEKFPFKKINSAYLLKDKKTVKYTLKNNTLTFDSYAVDDQNPDAVIVFEGKSTWSHPQFEK

SEQ ID NO: 185 - DNA, 3810 bp, Artificial Sequence
  SYNTHETIC FUSION PROTEN
atgggcagcagccatcatcatcatcatcacagcagcggcctggtgccgcgcggcagccatatggaggagaagactgttcaaacaggaaagacagatcagcaggttggtgctaaattggtacaggaaatccgtgaaggaaaacgcggaccactatatgctggttattttaggacatggcatgatcgtgcttcaacaggaatagatggtaaacagcaacatccagaaaatactatggctgaggtcccaaaagaagttgatatcttatttgtttttcatgaccatacagcttcagatagtccattttggtctgaattaaaggacagttatgtccataaattacatcaacagggaacggcacttgttcagatgattggtgttaacgaattaaatggacgtacaggtttatctaaagattatcctgatactcctgaggggaacaaagctttagcagcagccattgtcaaggcatttgtaactgatcgtggtgtcgatggactagatattgatattgagcacgaatttacgaacaaaagaacacctgaagaagatgctcgtgctctaaatgtttttaaagagattgcgcagttaataggtaaaaatggtagtgataaatctaaattgctcatcatggacactaccctaagtgttgaaaataatccaatatttaaagggatagcggaagatcttgattatcttcttagacaatattatggttcacaaggtggagaagctgaagtggatactataaactctgattggaaccaatatcagaattatattgatgctagccagttcatgattggattctccttttttgaagaatctgcgtccaaagggaatttatggtttgatgttaacgaatacgaccctaacaatcctgaaaaagggaaagatattgaaggaacacgtgctaaaaaatatgcagagtggcaacctagtacaggtggtttaaaagcaggtatattctcttatgctattgatcgtgatggagtggctcatgttccttcaacatataaaaataggactagtacaaatttacaacggcatgaagtcgataatatctcacatactgactacaccgtatctcgaaaattaaaaacattgatgaccgaagacaaacgctatgatgtcattgatcaaaaagacattcctgacccagcattaagagaacaaatcattcaacaagttggacagtataaaggcgatttggaacgttataacaagacattggtgcttacaggagataagattcaaaatcttaaaggactagaaaaattaagcaagttacaaaaattagagttgcgccagctatctaacgttaaagaaattactccagaacttttgccggaaagcatgaaaaaagatgctgagcttgttatggtaggcatgactggtttagaaaaactaaaccttagtggtctaaatcgtcaaactttagacggtatagacgtgaatagtattacgcatttgacatcatttgatatttcacataatagtttggacttgtcggaaaagagtgaagaccgtaaactattaatgactttgatggagcaggtttcaaatcatcaaaaaataacggtgaaaaatacggcttttgaaaatcaaaaaccgaaaggttattatcctcagacgtatgataccaaagaaggtcattatgatgttgataatgcagaacatgatattttaactgattttgtttttggaactgttactaaacgtaatacctttattggagacgaagaagcatttgctatctataaagaaggagctgtcgatggtcgacaatatgtgtctaaagactatacttatgaagcttttcgtaaagactataaaggttacaaggttcatttaactgcttctaacctaggagaaacagttacttctaaggtaactgctactactgatgaaacttacttagtagatgtttctgatggggaaaaagttgttcaccacatgaaactcaatataggatctggtgccatcatgatggaaaatctggcaaaaggggctaaagtgattggtacatctggggactttgagcaagcaaagaagattttcgatggtgaaaagtcagatagattcttcacttggggacaaactaactggatagcttttgatctaggagaaattaatcttgcgaaggaatggcgtttatttaatgcagagacaaatactgaaataaagacagatagtagcttaaacgtggctaaaggacgtcttcagattttaaaagatacaactattgatttagaaaaaatggacataaaaaatcgtaaagagtatctgtcgaatgatgaaaattggactgatgttgctcagatggatgatgcaaaagcgatatttaatagtaaattatccaatgttttatctcggtattggcggttttgtgtagatggtggagctagctcttattaccctcaatataccgaacttcaaatcctcggacaacgtttatcaaatgatgtcgctaatacgctgaaggatggatccggtgcttttagtcagcagaaatatcagccgacccaggcaaatctgaaagcacgtaccgaatttcaggatgaaaaatttggtatgttcatccatttcggcctgtatagcgaactgggtcgtggcgaatgggttatgaataatgataaaattccggttaacgactacgcaaaactgaaagatttttttaacccgattggctttaacgcaaaagaatatgtgagcatggcaaaaaatgcaggtgttaaatatatcaccctggtgacccgtcatcatgatggttttagcatgtggaataccaaatatagcgattttaacatcatgaacaccccgtttaaacgcgatctggttaaagaactggcaaatgaatgccataaacagggcgtgaaaattgccttttattatagcctgctggattggacccgtaccgattatagttattggaccggccgcaccggtaaaggtaccggccgtaccgaaaaaggtaattggaatgattatatccagttcatgaagaatcagctgaccgaactgctgaccaattatggcgaagttagcggtatttggtttgatggctattgggatcagatggaagaagaaaaagccggtcgtagtgaaaaaacctatattgattggaaaatgccggaaatttacgaactgattcataaactgcagccgcagtgtctggtgggtaataatcatcatattaccccgctggaaggcgaagattttcagatgtttgaacgcgatattccgggccagaatgaacatggtctgagttttcagaaaccgagccagctgccgctggaaacctgcgcaaccctgaatgatagttggggctttgatctgaaagataataaaaataagaccttcaaggagttcctgaatctgctggtgaatgccgcaggtagtaatgccaatctgctgatgaatattggcccgatgccgaatggtaaagttccgcagccgtttattaatagctttaaagaaatgggcgagtggattcgcgtttatggtgaaagcatttatggtacccgcggcggttatctgccgctgcagaaatggggcgcagtgacccagaaaagcggtaaaatttatgtgcatattctgaaaaacaacgagggtaaagccattaccctggaaaaatttccgtttaaaaagattaacagcgcatatctgctgaaagataaaaaaaccgtgaaatataccctgaaaaacaataccctgacctttgatagttatgccgttgatgatcagaatccggatgccgtgattgtgtttgaaggcaagagtacctggtctcatccgcagttcgagaaataa

SEQ ID NO: 186 - protein, 1269 aa, Artificial Sequence
  SYNTHETIC FUSION PROTEN
MGSSHHHHHHSSGLVPRGSHMEEKTVQTGKTDQQVGAKLVQEIREGKRGPLYAGYFRTWHDRASTGIDGKQQHPENTMAEVPKEVDILFVFHDHTASDSPFWSELKDSYVHKLHQQGTALVQMIGVNELNGRTGLSKDYPDTPEGNKALAAAIVKAFVTDRGVDGLDIDIEHEFTNKRTPEEDARALNVFKEIAQLIGKNGSDKSKLLIMDTTLSVENNPIFKGIAEDLDYLLRQYYGSQGGEAEVDTINSDWNQYQNYIDASQFMIGFSFFEESASKGNLWFDVNEYDPNNPEKGKDIEGTRAKKYAEWQPSTGGLKAGIFSYAIDRDGVAHVPSTYKNRTSTNLQRHEVDNISHTDYTVSRKLKTLMTEDKRYDVIDQKDIPDPALREQIIQQVGQYKGDLERYNKTLVLTGDKIQNLKGLEKLSKLQKLELRQLSNVKEITPELLPESMKKDAELVMVGMTGLEKLNLSGLNRQTLDGIDVNSITHLTSFDISHNSLDLSEKSEDRKLLMTLMEQVSNHQKITVKNTAFENQKPKGYYPQTYDTKEGHYDVDNAEHDILTDFVFGTVTKRNTFIGDEEAFAIYKEGAVDGRQYVSKDYTYEAFRKDYKGYKVHLTASNLGETVTSKVTATTDETYLVDVSDGEKVVHHMKLNIGSGAIMMENLAKGAKVIGTSGDFEQAKKIFDGEKSDRFFTWGQTNWIAFDLGEINLAKEWRLFNAETNTEIKTDSSLNVAKGRLQILKDTTIDLEKMDIKNRKEYLSNDENWTDVAQMDDAKAIFNSKLSNVLSRYWRFCVDGGASSYYPQYTELQILGQRLSNDVANTLKDGSGAFSQQKYQPTQANLKARTEFQDEKFGMFIHFGLYSELGRGEWVMNNDKIPVNDYAKLKDFFNPIGFNAKEYVSMAKNAGVKYITLVTRHHDGFSMWNTKYSDFNIMNTPFKRDLVKELANECHKQGVKIAFYYSLLDWTRTDYSYWTGRTGKGTGRTEKGNWNDYIQFMKNQLTELLTNYGEVSGIWFDGYWDQMEEEKAGRSEKTYIDWKMPEIYELIHKLQPQCLVGNNHHITPLEGEDFQMFERDIPGQNEHGLSFQKPSQLPLETCATLNDSWGFDLKDNKNKTFKEFLNLLVNAAGSNANLLMNIGPMPNGKVPQPFINSFKEMGEWIRVYGESIYGTRGGYLPLQKWGAVTQKSGKIYVHILKNNEGKAITLEKFPFKKINSAYLLKDKKTVKYTLKNNTLTFDSYAVDDQNPDAVIVFEGKSTWSHPQFEK

SEQ ID NO: 187 - DNA, 3810 bp, Artificial Sequence
  SYNTHETIC FUSION PROTEN
atgggcagcagccatcatcatcatcatcacagcagcggcctggtgccgcgcggcagccatatggaggagaagactgttcaaacaggaaagacagatcagcaggttggtgctaaattggtacaggaaatccgtgaaggaaaacgcggaccactatatgctggttattttaggacatggcatgatcgtgcttcaacaggaatagatggtaaacagcaacatccagaaaatactatggctgaggtcccaaaagaagttgatatcttatttgtttttcatgaccatacagcttcagatagtccattttggtctgaattaaaggacagttatgtccataaattacatcaacagggaacggcacttgttcagacaattggtgttaacgaattaaatggacgtacaggtttatctaaagattatcctgatactcctgaggggaacaaagctttagcagcagccattgtcaaggcatttgtaactgatcgtggtgtcgatggactagatattatgattgagcacgaatttacgaacaaaagaacacctgaagaagatgctcgtgctctaaatgtttttaaagagattgcgcagttaataggtaaaaatggtagtgataaatctaaattgctcatcatggacactaccctaagtgttgaaaataatccaatatttaaagggatagcggaagatcttgattatcttcttagacaatattatggttcacaaggtggagaagctgaagtggatactataaactctgattggaaccaatatcagaattatattgatgctagccagttcatgattggattctccttttttgaagaatctgcgtccaaagggaatttatggtttgatgttaacgaatacgaccctaacaatcctgaaaaagggaaagatattgaaggaacacgtgctaaaaaatatgcagagtggcaacctagtacaggtggtttaaaagcaggtatattctcttatgctattgatcgtgatggagtggctcatgttccttcaacatataaaaataggactagtacaaatttacaacggcatgaagtcgataatatctcacatactgactacaccgtatctcgaaaattaaaaacattgatgaccgaagacaaacgctatgatgtcattgatcaaaaagacattcctgacccagcattaagagaacaaatcattcaacaagttggacagtataaaggcgatttggaacgttataacaagacattggtgcttacaggagataagattcaaaatcttaaaggactagaaaaattaagcaagttacaaaaattagagttgcgccagctatctaacgttaaagaaattactccagaacttttgccggaaagcatgaaaaaagatgctgagcttgttatggtaggcatgactggtttagaaaaactaaaccttagtggtctaaatcgtcaaactttagacggtatagacgtgaatagtattacgcatttgacatcatttgatatttcacataatagtttggacttgtcggaaaagagtgaagaccgtaaactattaatgactttgatggagcaggtttcaaatcatcaaaaaataacggtgaaaaatacggcttttgaaaatcaaaaaccgaaaggttattatcctcagacgtatgataccaaagaaggtcattatgatgttgataatgcagaacatgatattttaactgattttgtttttggaactgttactaaacgtaatacctttattggagacgaagaagcatttgctatctataaagaaggagctgtcgatggtcgacaatatgtgtctaaagactatacttatgaagcttttcgtaaagactataaaggttacaaggttcatttaactgcttctaacctaggagaaacagttacttctaaggtaactgctactactgatgaaacttacttagtagatgtttctgatggggaaaaagttgttcaccacatgaaactcaatataggatctggtgccatcatgatggaaaatctggcaaaaggggctaaagtgattggtacatctggggactttgagcaagcaaagaagattttcgatggtgaaaagtcagatagattcttcacttggggacaaactaactggatagcttttgatctaggagaaattaatcttgcgaaggaatggcgtttatttaatgcagagacaaatactgaaataaagacagatagtagcttaaacgtggctaaaggacgtcttcagattttaaaagatacaactattgatttagaaaaaatggacataaaaaatcgtaaagagtatctgtcgaatgatgaaaattggactgatgttgctcagatggatgatgcaaaagcgatatttaatagtaaattatccaatgttttatctcggtattggcggttttgtgtagatggtggagctagctcttattaccctcaatataccgaacttcaaatcctcggacaacgtttatcaaatgatgtcgctaatacgctgaaggatggatccggtgcttttagtcagcagaaatatcagccgacccaggcaaatctgaaagcacgtaccgaatttcaggatgaaaaatttggtatgttcatccatttcggcctgtatagcgaactgggtcgtggcgaatgggttatgaataatgataaaattccggttaacgactacgcaaaactgaaagatttttttaacccgattggctttaacgcaaaagaatatgtgagcatggcaaaaaatgcaggtgttaaatatatcaccctggtgacccgtcatcatgatggttttagcatgtggaataccaaatatagcgattttaacatcatgaacaccccgtttaaacgcgatctggttaaagaactggcaaatgaatgccataaacagggcgtgaaaattgccttttattatagcctgctggattggacccgtaccgattatagttattggaccggccgcaccggtaaaggtaccggccgtaccgaaaaaggtaattggaatgattatatccagttcatgaagaatcagctgaccgaactgctgaccaattatggcgaagttagcggtatttggtttgatggctattgggatcagatggaagaagaaaaagccggtcgtagtgaaaaaacctatattgattggaaaatgccggaaatttacgaactgattcataaactgcagccgcagtgtctggtgggtaataatcatcatattaccccgctggaaggcgaagattttcagatgtttgaacgcgatattccgggccagaatgaacatggtctgagttttcagaaaccgagccagctgccgctggaaacctgcgcaaccctgaatgatagttggggctttgatctgaaagataataaaaataagaccttcaaggagttcctgaatctgctggtgaatgccgcaggtagtaatgccaatctgctgatgaatattggcccgatgccgaatggtaaagttccgcagccgtttattaatagctttaaagaaatgggcgagtggattcgcgtttatggtgaaagcatttatggtacccgcggcggttatctgccgctgcagaaatggggcgcagtgacccagaaaagcggtaaaatttatgtgcatattctgaaaaacaacgagggtaaagccattaccctggaaaaatttccgtttaaaaagattaacagcgcatatctgctgaaagataaaaaaaccgtgaaatataccctgaaaaacaataccctgacctttgatagttatgccgttgatgatcagaatccggatgccgtgattgtgtttgaaggcaagagtacctggtctcatccgcagttcgagaaataa

SEQ ID NO: 188 - protein, 1269 aa, Artificial Sequence
  SYNTHETIC FUSION PROTEN
MGSSHHHHHHSSGLVPRGSHMEEKTVQTGKTDQQVGAKLVQEIREGKRGPLYAGYFRTWHDRASTGIDGKQQHPENTMAEVPKEVDILFVFHDHTASDSPFWSELKDSYVHKLHQQGTALVQTIGVNELNGRTGLSKDYPDTPEGNKALAAAIVKAFVTDRGVDGLDIMIEHEFTNKRTPEEDARALNVFKEIAQLIGKNGSDKSKLLIMDTTLSVENNPIFKGIAEDLDYLLRQYYGSQGGEAEVDTINSDWNQYQNYIDASQFMIGFSFFEESASKGNLWFDVNEYDPNNPEKGKDIEGTRAKKYAEWQPSTGGLKAGIFSYAIDRDGVAHVPSTYKNRTSTNLQRHEVDNISHTDYTVSRKLKTLMTEDKRYDVIDQKDIPDPALREQIIQQVGQYKGDLERYNKTLVLTGDKIQNLKGLEKLSKLQKLELRQLSNVKEITPELLPESMKKDAELVMVGMTGLEKLNLSGLNRQTLDGIDVNSITHLTSFDISHNSLDLSEKSEDRKLLMTLMEQVSNHQKITVKNTAFENQKPKGYYPQTYDTKEGHYDVDNAEHDILTDFVFGTVTKRNTFIGDEEAFAIYKEGAVDGRQYVSKDYTYEAFRKDYKGYKVHLTASNLGETVTSKVTATTDETYLVDVSDGEKVVHHMKLNIGSGAIMMENLAKGAKVIGTSGDFEQAKKIFDGEKSDRFFTWGQTNWIAFDLGEINLAKEWRLFNAETNTEIKTDSSLNVAKGRLQILKDTTIDLEKMDIKNRKEYLSNDENWTDVAQMDDAKAIFNSKLSNVLSRYWRFCVDGGASSYYPQYTELQILGQRLSNDVANTLKDGSGAFSQQKYQPTQANLKARTEFQDEKFGMFIHFGLYSELGRGEWVMNNDKIPVNDYAKLKDFFNPIGFNAKEYVSMAKNAGVKYITLVTRHHDGFSMWNTKYSDFNIMNTPFKRDLVKELANECHKQGVKIAFYYSLLDWTRTDYSYWTGRTGKGTGRTEKGNWNDYIQFMKNQLTELLTNYGEVSGIWFDGYWDQMEEEKAGRSEKTYIDWKMPEIYELIHKLQPQCLVGNNHHITPLEGEDFQMFERDIPGQNEHGLSFQKPSQLPLETCATLNDSWGFDLKDNKNKTFKEFLNLLVNAAGSNANLLMNIGPMPNGKVPQPFINSFKEMGEWIRVYGESIYGTRGGYLPLQKWGAVTQKSGKIYVHILKNNEGKAITLEKFPFKKINSAYLLKDKKTVKYTLKNNTLTFDSYAVDDQNPDAVIVFEGKSTWSHPQFEK

SEQ ID NO: 189 - DNA, 3003 bp, Artificial Sequence
  SYNTHETIC FUSION PROTEN
atgggcagcagccatcatcatcatcatcacagcagcggcctggtgccgcgcggcagccatatgtttagtcagcagaaatatcagccgacccaggcaaatctgaaagcacgtaccgaatttcaggatgaaaaatttggtatgttcatccatttcggcctgtatagcgaactgggtcgtggcgaatgggttatgaataatgataaaattccggttaacgactacgcaaaactgaaagatttttttaacccgattggctttaacgcaaaagaatatgtgagcatggcaaaaaatgcaggtgttaaatatatcaccctggtgacccgtcatcatgatggttttagcatgtggaataccaaatatagcgattttaacatcatgaacaccccgtttaaacgcgatctggttaaagaactggcaaatgaatgccataaacagggcgtgaaaattgccttttattatagcctgctggattggacccgtaccgattatagttattggaccggccgcaccggtaaaggtaccggccgtaccgaaaaaggtaattggaatgattatatccagttcatgaagaatcagctgaccgaactgctgaccaattatggcgaagttagcggtatttggtttgatggctattgggatcagatggaagaagaaaaagccggtcgtagtgaaaaaacctatattgattggaaaatgccggaaatttacgaactgattcataaactgcagccgcagtgtctggtgggtaataatcatcatattaccccgctggaaggcgaagattttcagatgtttgaacgcgatattccgggccagaatgaacatggtctgagttttcagaaaccgagccagctgccgctggaaacctgcgcaaccctgaatgatagttggggctttgatctgaaagataataaaaataagaccttcaaggagttcctgaatctgctggtgaatgccgcaggtagtaatgccaatctgctgatgaatattggcccgatgccgaatggtaaagttccgcagccgtttattaatagctttaaagaaatgggcgagtggattcgcgtttatggtgaaagcatttatggtacccgcggcggttatctgccgctgcagaaatggggcgcagtgacccagaaaagcggtaaaatttatgtgcatattctgaaaaacaacgagggtaaagccattaccctggaaaaatttccgtttaaaaagattaacagcgcatatctgctgaaagataaaaaaaccgtgaaatataccctgaaaaacaataccctgacctttgatagttatgccgttgatgatcagaatccggatgccgtgattgtgtttgaaggcaagggatccaaagataagtcgtatgatctgattgatgagaaagatttcccagataaggctttgcgagaagctgtgatggcgcaggttggaaccagaaaaggtgatttggaacgtttcaatggcacattacgattggataatccagcgattcaaagtttagaaggtctaaataaatttaaaaaattagctcaattagacttgattggcttatctcgcattacaaagctcgaccgttctgttttacccgctaatatgaagccaggcaaagataccttggaaacagttcttgaaacctataaaaaggataacaaagaagaacctgctactatcccaccagtatctttgaaggtttctggtttaactggtctgaaagaattagatttgtcaggttttgaccgtgaaaccttggctggtcttgatgccgctactctaacgtctttagaaaaagttgatatttctggcaacaaacttgatttggctccaggaacagaaaatcgacaaatttttgatactatgctatcaactatcagcaatcatgttggaagcaatgaacaaacagtgaaatttgacaagcaaaaaccaactgggcattacccagatacctatgggaaaactagtctgcgcttaccagtggcaaatgaaaaagttgatttgcaaagccagcttttgtttgggactgtgacaaatcaaggaaccctaatcaatagcgaagcagactataaggcttaccaaaatcataaaattgctggacgtagctttgttgattcaaactatcattacaataactttaaagtttcttatgagaactataccgttaaagtaactgattccacattgggaaccactactgacaaaacgctagcaactgataaagaagagacctataaggttgacttctttagcccagcagataagacaaaagctgttcatactgctaaagtgattgttggtgacgaaaaaaccatgatggttaatttggcagaaggcgcaacagttattggaggaagtgctgatcctgtaaatgcaagaaaggtatttgatgggcaactgggcagtgagactgataatatctctttaggatgggattctaagcaaagtattatatttaaattgaaagaagatggattaataaagcattggcgtttcttcaatgattcagcccgaaatcctgagacaaccaataaacctattcaggaagcaagtctacaaatttttaatatcaaagattataatctagataatttgttggaaaatcccaataaatttgatgatgaaaaatattggattactgtagatacttacagtgcacaaggagagagagctactgcattcagtaatacattaaataatattactagtaaatattggcgagttgtctttgatactaaaggagatagatatagttcgccagtagtccctgaactccaaattttaggttatccgttacctaacgccgacactatcatgaaaacagtaactactgctaaagagttatctcaacaaaaagataagttttctcaaaagatgcttgatgagttaaaaataaaagagatggctttagaaacttctttgaacagtaagatttttgatgtaactgctattaatgctaatgctggagttttgaaagattgtattgagaaaaggcagctgctaaaaaaataa

SEQ ID NO: 190 - protein, 999 aa, Artificial Sequence
  SYNTHETIC FUSION PROTEN
MGSSHHHHHHSSGLVPRGSHMFSQQKYQPTQANLKARTEFQDEKFGMFIHFGLYSELGRGEWVMNNDKIPVNDYAKLKDFFNPIGFNAKEYVSMAKNAGVKYITLVTRHHDGFSMWNTKYSDFNIMNTPFKRDLVKELANECHKQGVKIAFYYSLLDWTRTDYSYWTGRTGKGTGRTEKGNWNDYIQFMKNQLTELLTNYGEVSGIWFDGYWDQMEEEKAGRSEKTYIDWKMPEIYELIHKLQPQCLVGNNHHITPLEGEDFQMFERDIPGQNEHGLSFQKPSQLPLETCATLNDSWGFDLKDNKNKTFKEFLNLLVNAAGSNANLLMNIGPMPNGKVPQPFINSFKEMGEWIRVYGESIYGTRGGYLPLQKWGAVTQKSGKIYVHILKNNEGKAITLEKFPFKKINSAYLLKDKKTVKYTLKNNTLTFDSYAVDDQNPDAVIVFEGKGSKDKSYDLIDEKDFPDKALREAVMAQVGTRKGDLERFNGTLRLDNPAIQSLEGLNKFKKLAQLDLIGLSRITKLDRSVLPANMKPGKDTLETVLETYKKDNKEEPATIPPVSLKVSGLTGLKELDLSGFDRETLAGLDAATLTSLEKVDISGNKLDLAPGTENRQIFDTMLSTISNHVGSNEQTVKFDKQKPTGHYPDTYGKTSLRLPVANEKVDLQSQLLFGTVTNQGTLINSEADYKAYQNHKIAGRSFVDSNYHYNNFKVSYENYTVKVTDSTLGTTTDKTLATDKEETYKVDFFSPADKTKAVHTAKVIVGDEKTMMVNLAEGATVIGGSADPVNARKVFDGQLGSETDNISLGWDSKQSIIFKLKEDGLIKHWRFFNDSARNPETTNKPIQEASLQIFNIKDYNLDNLLENPNKFDDEKYWITVDTYSAQGERATAFSNTLNNITSKYWRVVFDTKGDRYSSPVVPELQILGYPLPNADTIMKTVTTAKELSQQKDKFSQKMLDELKIKEMALETSLNSKIFDVTAINANAGVLKDCIEKRQLLK

SEQ ID NO: 191 - DNA, 2730 bp, Artificial Sequence
  SYNTHETIC FUSION PROTEN
atgggcagcagccatcatcatcatcatcacagcagcggcctggtgccgcgcggcagccatatgtttagtcagcagaaatatcagccgacccaggcaaatctgaaagcacgtaccgaatttcaggatgaaaaatttggtatgttcatccatttcggcctgtatagcgaactgggtcgtggcgaatgggttatgaataatgataaaattccggttaacgactacgcaaaactgaaagatttttttaacccgattggctttaacgcaaaagaatatgtgagcatggcaaaaaatgcaggtgttaaatatatcaccctggtgacccgtcatcatgatggttttagcatgtggaataccaaatatagcgattttaacatcatgaacaccccgtttaaacgcgatctggttaaagaactggcaaatgaatgccataaacagggcgtgaaaattgccttttattatagcctgctggattggacccgtaccgattatagttattggaccggccgcaccggtaaaggtaccggccgtaccgaaaaaggtaattggaatgattatatccagttcatgaagaatcagctgaccgaactgctgaccaattatggcgaagttagcggtatttggtttgatggctattgggatcagatggaagaagaaaaagccggtcgtagtgaaaaaacctatattgattggaaaatgccggaaatttacgaactgattcataaactgcagccgcagtgtctggtgggtaataatcatcatattaccccgctggaaggcgaagattttcagatgtttgaacgcgatattccgggccagaatgaacatggtctgagttttcagaaaccgagccagctgccgctggaaacctgcgcaaccctgaatgatagttggggctttgatctgaaagataataaaaataagaccttcaaggagttcctgaatctgctggtgaatgccgcaggtagtaatgccaatctgctgatgaatattggcccgatgccgaatggtaaagttccgcagccgtttattaatagctttaaagaaatgggcgagtggattcgcgtttatggtgaaagcatttatggtacccgcggcggttatctgccgctgcagaaatggggcgcagtgacccagaaaagcggtaaaatttatgtgcatattctgaaaaacaacgagggtaaagccattaccctggaaaaatttccgtttaaaaagattaacagcgcatatctgctgaaagataaaaaaaccgtgaaatataccctgaaaaacaataccctgacctttgatagttatgccgttgatgatcagaatccggatgccgtgattgtgtttgaaggcaagggatccaccgaagacaaacgctatgatgtcattgatcaaaaagacattcctgacccagcattaagagaacaaatcattcaacaagttggacagtataaaggcgatttggaacgttataacaagacattggtgcttacaggagataagattcaaaatcttaaaggactagaaaaattaagcaagttacaaaaattagagttgcgccagctatctaacgttaaagaaattactccagaacttttgccggaaagcatgaaaaaagatgctgagcttgttatggtaggcatgactggtttagaaaaactaaaccttagtggtctaaatcgtcaaactttagacggtatagacgtgaatagtattacgcatttgacatcatttgatatttcacataatagtttggacttgtcggaaaagagtgaagaccgtaaactattaatgactttgatggagcaggtttcaaatcatcaaaaaataacggtgaaaaatacggcttttgaaaatcaaaaaccgaaaggttattatcctcagacgtatgataccaaagaaggtcattatgatgttgataatgcagaacatgatattttaactgattttgtttttggaactgttactaaacgtaatacctttattggagacgaagaagcatttgctatctataaagaaggagctgtcgatggtcgacaatatgtgtctaaagactatacttatgaagcttttcgtaaagactataaaggttacaaggttcatttaactgcttctaacctaggagaaacagttacttctaaggtaactgctactactgatgaaacttacttagtagatgtttctgatggggaaaaagttgttcaccacatgaaactcaatataggatctggtgccatcatgatggaaaatctggcaaaaggggctaaagtgattggtacatctggggactttgagcaagcaaagaagattttcgatggtgaaaagtcagatagattcttcacttggggacaaactaactggatagcttttgatctaggagaaattaatcttgcgaaggaatggcgtttatttaatgcagagacaaatactgaaataaagacagatagtagcttaaacgtggctaaaggacgtcttcagattttaaaagatacaactattgatttagaaaaaatggacataaaaaatcgtaaagagtatctgtcgaatgatgaaaattggactgatgttgctcagatggatgatgcaaaagcgatatttaatagtaaattatccaatgttttatctcggtattggcggttttgtgtagatggtggagctagctcttattaccctcaatataccgaacttcaaatcctcggacaacgtttatcaaatgatgtcgctaatacgctgaaggattaa

SEQ ID NO: 192 - protein, 909 aa, Artificial Sequence
  SYNTHETIC FUSION PROTEN
MGSSHHHHHHSSGLVPRGSHMFSQQKYQPTQANLKARTEFQDEKFGMFIHFGLYSELGRGEWVMNNDKIPVNDYAKLKDFFNPIGFNAKEYVSMAKNAGVKYITLVTRHHDGFSMWNTKYSDFNIMNTPFKRDLVKELANECHKQGVKIAFYYSLLDWTRTDYSYWTGRTGKGTGRTEKGNWNDYIQFMKNQLTELLTNYGEVSGIWFDGYWDQMEEEKAGRSEKTYIDWKMPEIYELIHKLQPQCLVGNNHHITPLEGEDFQMFERDIPGQNEHGLSFQKPSQLPLETCATLNDSWGFDLKDNKNKTFKEFLNLLVNAAGSNANLLMNIGPMPNGKVPQPFINSFKEMGEWIRVYGESIYGTRGGYLPLQKWGAVTQKSGKIYVHILKNNEGKAITLEKFPFKKINSAYLLKDKKTVKYTLKNNTLTFDSYAVDDQNPDAVIVFEGKGSTEDKRYDVIDQKDIPDPALREQIIQQVGQYKGDLERYNKTLVLTGDKIQNLKGLEKLSKLQKLELRQLSNVKEITPELLPESMKKDAELVMVGMTGLEKLNLSGLNRQTLDGIDVNSITHLTSFDISHNSLDLSEKSEDRKLLMTLMEQVSNHQKITVKNTAFENQKPKGYYPQTYDTKEGHYDVDNAEHDILTDFVFGTVTKRNTFIGDEEAFAIYKEGAVDGRQYVSKDYTYEAFRKDYKGYKVHLTASNLGETVTSKVTATTDETYLVDVSDGEKVVHHMKLNIGSGAIMMENLAKGAKVIGTSGDFEQAKKIFDGEKSDRFFTWGQTNWIAFDLGEINLAKEWRLFNAETNTEIKTDSSLNVAKGRLQILKDTTIDLEKMDIKNRKEYLSNDENWTDVAQMDDAKAIFNSKLSNVLSRYWRFCVDGGASSYYPQYTELQILGQRLSNDVANTLKD

SEQ ID NO: 193 - DNA, 4263 bp, Artificial Sequence
  SYNTHETIC FUSION PROTEN
atgggcagcagccatcatcatcatcatcacagcagcggcctggtgccgcgcggcagccatatgtttagtcagcagaaatatcagccgacccaggcaaatctgaaagcacgtaccgaatttcaggatgaaaaatttggtatgttcatccatttcggcctgtatagcgaactgggtcgtggcgaatgggttatgaataatgataaaattccggttaacgactacgcaaaactgaaagatttttttaacccgattggctttaacgcaaaagaatatgtgagcatggcaaaaaatgcaggtgttaaatatatcaccctggtgacccgtcatcatgatggttttagcatgtggaataccaaatatagcgattttaacatcatgaacaccccgtttaaacgcgatctggttaaagaactggcaaatgaatgccataaacagggcgtgaaaattgccttttattatagcctgctggattggacccgtaccgattatagttattggaccggccgcaccggtaaaggtaccggccgtaccgaaaaaggtaattggaatgattatatccagttcatgaagaatcagctgaccgaactgctgaccaattatggcgaagttagcggtatttggtttgatggctattgggatcagatggaagaagaaaaagccggtcgtagtgaaaaaacctatattgattggaaaatgccggaaatttacgaactgattcataaactgcagccgcagtgtctggtgggtaataatcatcatattaccccgctggaaggcgaagattttcagatgtttgaacgcgatattccgggccagaatgaacatggtctgagttttcagaaaccgagccagctgccgctggaaacctgcgcaaccctgaatgatagttggggctttgatctgaaagataataaaaataagaccttcaaggagttcctgaatctgctggtgaatgccgcaggtagtaatgccaatctgctgatgaatattggcccgatgccgaatggtaaagttccgcagccgtttattaatagctttaaagaaatgggcgagtggattcgcgtttatggtgaaagcatttatggtacccgcggcggttatctgccgctgcagaaatggggcgcagtgacccagaaaagcggtaaaatttatgtgcatattctgaaaaacaacgagggtaaagccattaccctggaaaaatttccgtttaaaaagattaacagcgcatatctgctgaaagataaaaaaaccgtgaaatataccctgaaaaacaataccctgacctttgatagttatgccgttgatgatcagaatccggatgccgtgattgtgtttgaaggcaagggatccacccaccatgattcactcaatactgtaaaagcggaggagaagactgttcaggttcagaaaggattaccttctatcgatagcttgcattatctgtcagagaatagcaaaaaagaatttaaagaagaactctcaaaagcggggcaagaatctcaaaaggtcaaagagatattagcaaaagctcagcaggcagataaacaagctcaagaacttgccaaaatgaaaattcctgagaaaataccgatgaaaccgttacatggttctctctacggtggttactttagaacttggcatgacaaaacatcagatccaacagaaaaagacaaagttaactcgatgggagagcttcctaaagaagtagatctagcctttattttccacgattggacaaaagattatagccttttttggaaagaattggccaccaaacatgtgccaaagttaaacaagcaagggacacgtgtcattcgtaccattccatggcgtttcctagctgggggtgataacagtggtattgcagaagataccagtaaatacccaaatacaccagagggaaataaagctttagccaaagctattgttgatgaatatgtttataaatacaaccttgatggcttagatgtggatgttgaacatgatagtattccaaaagttgacaaaaaagaagatacagcaggcgtagaacgctctattcaagtgtttgaagaaattgggaaattaattggaccaaaaggtgttgataaatcgcggttatttattatggatagcacctacatggctgataaaaacccattgattgagcgaggagctccttatattaatttattactggtacaggtctatggttcacaaggagagaaaggtggttgggagcctgtttctaatcgacctgaaaaaacaatggaagaacgatggcaaggttatagcaagtatattcgtcctgaacaatacatgattggtttttctttctatgaggaaaatgctcaagaagggaatctttggtatgatattaattctcgcaaggacgaggacaaagcaaatggaattaacactgacataactggaacgcgtgccgaacggtatgcaaggtggcaacctaagacaggtggggttaagggaggtatcttctcctacgctattgaccgagatggtgtagctcatcaacctaaaaaatatgctaaacagaaagagtttaaggacgcaactgataacatcttccactcagattatagtgtctccaaggcattaaagacagttatgctaaaagataagtcgtatgatctgattgatgagaaagatttcccagataaggctttgcgagaagctgtgatggcgcaggttggaaccagaaaaggtgatttggaacgtttcaatggcacattacgattggataatccagcgattcaaagtttagaaggtctaaataaatttaaaaaattagctcaattagacttgattggcttatctcgcattacaaagctcgaccgttctgttttacccgctaatatgaagccaggcaaagataccttggaaacagttcttgaaacctataaaaaggataacaaagaagaacctgctactatcccaccagtatctttgaaggtttctggtttaactggtctgaaagaattagatttgtcaggttttgaccgtgaaaccttggctggtcttgatgccgctactctaacgtctttagaaaaagttgatatttctggcaacaaacttgatttggctccaggaacagaaaatcgacaaatttttgatactatgctatcaactatcagcaatcatgttggaagcaatgaacaaacagtgaaatttgacaagcaaaaaccaactgggcattacccagatacctatgggaaaactagtctgcgcttaccagtggcaaatgaaaaagttgatttgcaaagccagcttttgtttgggactgtgacaaatcaaggaaccctaatcaatagcgaagcagactataaggcttaccaaaatcataaaattgctggacgtagctttgttgattcaaactatcattacaataactttaaagtttcttatgagaactataccgttaaagtaactgattccacattgggaaccactactgacaaaacgctagcaactgataaagaagagacctataaggttgacttctttagcccagcagataagacaaaagctgttcatactgctaaagtgattgttggtgacgaaaaaaccatgatggttaatttggcagaaggcgcaacagttattggaggaagtgctgatcctgtaaatgcaagaaaggtatttgatgggcaactgggcagtgagactgataatatctctttaggatgggattctaagcaaagtattatatttaaattgaaagaagatggattaataaagcattggcgtttcttcaatgattcagcccgaaatcctgagacaaccaataaacctattcaggaagcaagtctacaaatttttaatatcaaagattataatctagataatttgttggaaaatcccaataaatttgatgatgaaaaatattggattactgtagatacttacagtgcacaaggagagagagctactgcattcagtaatacattaaataatattactagtaaatattggcgagttgtctttgatactaaaggagatagatatagttcgccagtagtccctgaactccaaattttaggttatccgttacctaacgccgacactatcatgaaaacagtaactactgctaaagagttatctcaacaaaaagataagttttctcaaaagatgcttgatgagttaaaaataaaagagatggctttagaaacttctttgaacagtaagatttttgatgtaactgctattaatgctaatgctggagttttgaaagattgtattgagaaaaggcagctgctaaaaaaataa

SEQ ID NO: 194 - protein, 1420 aa, Artificial Sequence
  SYNTHETIC FUSION PROTEN
MGSSHHHHHHSSGLVPRGSHMFSQQKYQPTQANLKARTEFQDEKFGMFIHFGLYSELGRGEWVMNNDKIPVNDYAKLKDFFNPIGFNAKEYVSMAKNAGVKYITLVTRHHDGFSMWNTKYSDFNIMNTPFKRDLVKELANECHKQGVKIAFYYSLLDWTRTDYSYWTGRTGKGTGRTEKGNWNDYIQFMKNQLTELLTNYGEVSGIWFDGYWDQMEEEKAGRSEKTYIDWKMPEIYELIHKLQPQCLVGNNHHITPLEGEDFQMFERDIPGQNEHGLSFQKPSQLPLETCATLNDSWGFDLKDNKNKTFKEFLNLLVNAAGSNANLLMNIGPMPNGKVPQPFINSFKEMGEWIRVYGESIYGTRGGYLPLQKWGAVTQKSGKIYVHILKNNEGKAITLEKFPFKKINSAYLLKDKKTVKYTLKNNTLTFDSYAVDDQNPDAVIVFEGKGSTHHDSLNTVKAEEKTVQVQKGLPSIDSLHYLSENSKKEFKEELSKAGQESQKVKEILAKAQQADKQAQELAKMKIPEKIPMKPLHGSLYGGYFRTWHDKTSDPTEKDKVNSMGELPKEVDLAFIFHDWTKDYSLFWKELATKHVPKLNKQGTRVIRTIPWRFLAGGDNSGIAEDTSKYPNTPEGNKALAKAIVDEYVYKYNLDGLDVDVEHDSIPKVDKKEDTAGVERSIQVFEEIGKLIGPKGVDKSRLFIMDSTYMADKNPLIERGAPYINLLLVQVYGSQGEKGGWEPVSNRPEKTMEERWQGYSKYIRPEQYMIGFSFYEENAQEGNLWYDINSRKDEDKANGINTDITGTRAERYARWQPKTGGVKGGIFSYAIDRDGVAHQPKKYAKQKEFKDATDNIFHSDYSVSKALKTVMLKDKSYDLIDEKDFPDKALREAVMAQVGTRKGDLERFNGTLRLDNPAIQSLEGLNKFKKLAQLDLIGLSRITKLDRSVLPANMKPGKDTLETVLETYKKDNKEEPATIPPVSLKVSGLTGLKELDLSGFDRETLAGLDAATLTSLEKVDISGNKLDLAPGTENRQIFDTMLSTISNHVGSNEQTVKFDKQKPTGHYPDTYGKTSLRLPVANEKVDLQSQLLFGTVTNQGTLINSEADYKAYQNHKIAGRSFVDSNYHYNNFKVSYENYTVKVTDSTLGTTTDKTLATDKEETYKVDFFSPADKTKAVHTAKVIVGDEKTMMVNLAEGATVIGGSADPVNARKVFDGQLGSETDNISLGWDSKQSIIFKLKEDGLIKHWRFFNDSARNPETTNKPIQEASLQIFNIKDYNLDNLLENPNKFDDEKYWITVDTYSAQGERATAFSNTLNNITSKYWRVVFDTKGDRYSSPVVPELQILGYPLPNADTIMKTVTTAKELSQQKDKFSQKMLDELKIKEMALETSLNSKIFDVTAINANAGVLKDCIEKRQLLKK

SEQ ID NO: 195 - DNA, 4263 bp, Artificial Sequence
  SYNTHETIC FUSION PROTEN
atgggcagcagccatcatcatcatcatcacagcagcggcctggtgccgcgcggcagccatatgtttagtcagcagaaatatcagccgacccaggcaaatctgaaagcacgtaccgaatttcaggatgaaaaatttggtatgttcatccatttcggcctgtatagcgaactgggtcgtggcgaatgggttatgaataatgataaaattccggttaacgactacgcaaaactgaaagatttttttaacccgattggctttaacgcaaaagaatatgtgagcatggcaaaaaatgcaggtgttaaatatatcaccctggtgacccgtcatcatgatggttttagcatgtggaataccaaatatagcgattttaacatcatgaacaccccgtttaaacgcgatctggttaaagaactggcaaatgaatgccataaacagggcgtgaaaattgccttttattatagcctgctggattggacccgtaccgattatagttattggaccggccgcaccggtaaaggtaccggccgtaccgaaaaaggtaattggaatgattatatccagttcatgaagaatcagctgaccgaactgctgaccaattatggcgaagttagcggtatttggtttgatggctattgggatcagatggaagaagaaaaagccggtcgtagtgaaaaaacctatattgattggaaaatgccggaaatttacgaactgattcataaactgcagccgcagtgtctggtgggtaataatcatcatattaccccgctggaaggcgaagattttcagatgtttgaacgcgatattccgggccagaatgaacatggtctgagttttcagaaaccgagccagctgccgctggaaacctgcgcaaccctgaatgatagttggggctttgatctgaaagataataaaaataagaccttcaaggagttcctgaatctgctggtgaatgccgcaggtagtaatgccaatctgctgatgaatattggcccgatgccgaatggtaaagttccgcagccgtttattaatagctttaaagaaatgggcgagtggattcgcgtttatggtgaaagcatttatggtacccgcggcggttatctgccgctgcagaaatggggcgcagtgacccagaaaagcggtaaaatttatgtgcatattctgaaaaacaacgagggtaaagccattaccctggaaaaatttccgtttaaaaagattaacagcgcatatctgctgaaagataaaaaaaccgtgaaatataccctgaaaaacaataccctgacctttgatagttatgccgttgatgatcagaatccggatgccgtgattgtgtttgaaggcaagggatccacccaccatgattcactcaatactgtaaaagcggaggagaagactgttcaggttcagaaaggattaccttctatcgatagcttgcattatctgtcagagaatagcaaaaaagaatttaaagaagaactctcaaaagcggggcaagaatctcaaaaggtcaaagagatattagcaaaagctcagcaggcagataaacaagctcaagaacttgccaaaatgaaaattcctgagaaaataccgatgaaaccgttacatggttctctctacggtggttactttagaacttggcatgacaaaacatcagatccaacagaaaaagacaaagttaactcgatgggagagcttcctaaagaagtagatctagcctttattttccacgattggacaaaagattatagccttttttggaaagaattggccaccaaacatgtgccaaagttaaacaagcaagggacacgtgtcattcgtaccattccatggcgtttcctagctgggggtgataacagtggtattgcagaagataccagtaaatacccaaatacaccagagggaaataaagctttagccaaagctattgttgatgaatatgtttataaatacaaccttgatggcttagatgtgcaggttgaacatgatagtattccaaaagttgacaaaaaagaagatacagcaggcgtagaacgctctattcaagtgtttgaagaaattgggaaattaattggaccaaaaggtgttgataaatcgcggttatttattatggatagcacctacatggctgataaaaacccattgattgagcgaggagctccttatattaatttattactggtacaggtctatggttcacaaggagagaaaggtggttgggagcctgtttctaatcgacctgaaaaaacaatggaagaacgatggcaaggttatagcaagtatattcgtcctgaacaatacatgattggtttttctttctatgaggaaaatgctcaagaagggaatctttggtatgatattaattctcgcaaggacgaggacaaagcaaatggaattaacactgacataactggaacgcgtgccgaacggtatgcaaggtggcaacctaagacaggtggggttaagggaggtatcttctcctacgctattgaccgagatggtgtagctcatcaacctaaaaaatatgctaaacagaaagagtttaaggacgcaactgataacatcttccactcagattatagtgtctccaaggcattaaagacagttatgctaaaagataagtcgtatgatctgattgatgagaaagatttcccagataaggctttgcgagaagctgtgatggcgcaggttggaaccagaaaaggtgatttggaacgtttcaatggcacattacgattggataatccagcgattcaaagtttagaaggtctaaataaatttaaaaaattagctcaattagacttgattggcttatctcgcattacaaagctcgaccgttctgttttacccgctaatatgaagccaggcaaagataccttggaaacagttcttgaaacctataaaaaggataacaaagaagaacctgctactatcccaccagtatctttgaaggtttctggtttaactggtctgaaagaattagatttgtcaggttttgaccgtgaaaccttggctggtcttgatgccgctactctaacgtctttagaaaaagttgatatttctggcaacaaacttgatttggctccaggaacagaaaatcgacaaatttttgatactatgctatcaactatcagcaatcatgttggaagcaatgaacaaacagtgaaatttgacaagcaaaaaccaactgggcattacccagatacctatgggaaaactagtctgcgcttaccagtggcaaatgaaaaagttgatttgcaaagccagcttttgtttgggactgtgacaaatcaaggaaccctaatcaatagcgaagcagactataaggcttaccaaaatcataaaattgctggacgtagctttgttgattcaaactatcattacaataactttaaagtttcttatgagaactataccgttaaagtaactgattccacattgggaaccactactgacaaaacgctagcaactgataaagaagagacctataaggttgacttctttagcccagcagataagacaaaagctgttcatactgctaaagtgattgttggtgacgaaaaaaccatgatggttaatttggcagaaggcgcaacagttattggaggaagtgctgatcctgtaaatgcaagaaaggtatttgatgggcaactgggcagtgagactgataatatctctttaggatgggattctaagcaaagtattatatttaaattgaaagaagatggattaataaagcattggcgtttcttcaatgattcagcccgaaatcctgagacaaccaataaacctattcaggaagcaagtctacaaatttttaatatcaaagattataatctagataatttgttggaaaatcccaataaatttgatgatgaaaaatattggattactgtagatacttacagtgcacaaggagagagagctactgcattcagtaatacattaaataatattactagtaaatattggcgagttgtctttgatactaaaggagatagatatagttcgccagtagtccctgaactccaaattttaggttatccgttacctaacgccgacactatcatgaaaacagtaactactgctaaagagttatctcaacaaaaagataagttttctcaaaagatgcttgatgagttaaaaataaaagagatggctttagaaacttctttgaacagtaagatttttgatgtaactgctattaatgctaatgctggagttttgaaagattgtattgagaaaaggcagctgctaaaaaaataa

SEQ ID NO: 196 - protein, 1420 aa, Artificial Sequence
  SYNTHETIC FUSION PROTEN
MGSSHHHHHHSSGLVPRGSHMFSQQKYQPTQANLKARTEFQDEKFGMFIHFGLYSELGRGEWVMNNDKIPVNDYAKLKDFFNPIGFNAKEYVSMAKNAGVKYITLVTRHHDGFSMWNTKYSDFNIMNTPFKRDLVKELANECHKQGVKIAFYYSLLDWTRTDYSYWTGRTGKGTGRTEKGNWNDYIQFMKNQLTELLTNYGEVSGIWFDGYWDQMEEEKAGRSEKTYIDWKMPEIYELIHKLQPQCLVGNNHHITPLEGEDFQMFERDIPGQNEHGLSFQKPSQLPLETCATLNDSWGFDLKDNKNKTFKEFLNLLVNAAGSNANLLMNIGPMPNGKVPQPFINSFKEMGEWIRVYGESIYGTRGGYLPLQKWGAVTQKSGKIYVHILKNNEGKAITLEKFPFKKINSAYLLKDKKTVKYTLKNNTLTFDSYAVDDQNPDAVIVFEGKGSTHHDSLNTVKAEEKTVQVQKGLPSIDSLHYLSENSKKEFKEELSKAGQESQKVKEILAKAQQADKQAQELAKMKIPEKIPMKPLHGSLYGGYFRTWHDKTSDPTEKDKVNSMGELPKEVDLAFIFHDWTKDYSLFWKELATKHVPKLNKQGTRVIRTIPWRFLAGGDNSGIAEDTSKYPNTPEGNKALAKAIVDEYVYKYNLDGLDVQVEHDSIPKVDKKEDTAGVERSIQVFEEIGKLIGPKGVDKSRLFIMDSTYMADKNPLIERGAPYINLLLVQVYGSQGEKGGWEPVSNRPEKTMEERWQGYSKYIRPEQYMIGFSFYEENAQEGNLWYDINSRKDEDKANGINTDITGTRAERYARWQPKTGGVKGGIFSYAIDRDGVAHQPKKYAKQKEFKDATDNIFHSDYSVSKALKTVMLKDKSYDLIDEKDFPDKALREAVMAQVGTRKGDLERFNGTLRLDNPAIQSLEGLNKFKKLAQLDLIGLSRITKLDRSVLPANMKPGKDTLETVLETYKKDNKEEPATIPPVSLKVSGLTGLKELDLSGFDRETLAGLDAATLTSLEKVDISGNKLDLAPGTENRQIFDTMLSTISNHVGSNEQTVKFDKQKPTGHYPDTYGKTSLRLPVANEKVDLQSQLLFGTVTNQGTLINSEADYKAYQNHKIAGRSFVDSNYHYNNFKVSYENYTVKVTDSTLGTTTDKTLATDKEETYKVDFFSPADKTKAVHTAKVIVGDEKTMMVNLAEGATVIGGSADPVNARKVFDGQLGSETDNISLGWDSKQSIIFKLKEDGLIKHWRFFNDSARNPETTNKPIQEASLQIFNIKDYNLDNLLENPNKFDDEKYWITVDTYSAQGERATAFSNTLNNITSKYWRVVFDTKGDRYSSPVVPELQILGYPLPNADTIMKTVTTAKELSQQKDKFSQKMLDELKIKEMALETSLNSKIFDVTAINANAGVLKDCIEKRQLLKK

SEQ ID NO: 197 - DNA, 3774 bp, Artificial Sequence
  SYNTHETIC FUSION PROTEN
atgggcagcagccatcatcatcatcatcacagcagcggcctggtgccgcgcggcagccatatgtttagtcagcagaaatatcagccgacccaggcaaatctgaaagcacgtaccgaatttcaggatgaaaaatttggtatgttcatccatttcggcctgtatagcgaactgggtcgtggcgaatgggttatgaataatgataaaattccggttaacgactacgcaaaactgaaagatttttttaacccgattggctttaacgcaaaagaatatgtgagcatggcaaaaaatgcaggtgttaaatatatcaccctggtgacccgtcatcatgatggttttagcatgtggaataccaaatatagcgattttaacatcatgaacaccccgtttaaacgcgatctggttaaagaactggcaaatgaatgccataaacagggcgtgaaaattgccttttattatagcctgctggattggacccgtaccgattatagttattggaccggccgcaccggtaaaggtaccggccgtaccgaaaaaggtaattggaatgattatatccagttcatgaagaatcagctgaccgaactgctgaccaattatggcgaagttagcggtatttggtttgatggctattgggatcagatggaagaagaaaaagccggtcgtagtgaaaaaacctatattgattggaaaatgccggaaatttacgaactgattcataaactgcagccgcagtgtctggtgggtaataatcatcatattaccccgctggaaggcgaagattttcagatgtttgaacgcgatattccgggccagaatgaacatggtctgagttttcagaaaccgagccagctgccgctggaaacctgcgcaaccctgaatgatagttggggctttgatctgaaagataataaaaataagaccttcaaggagttcctgaatctgctggtgaatgccgcaggtagtaatgccaatctgctgatgaatattggcccgatgccgaatggtaaagttccgcagccgtttattaatagctttaaagaaatgggcgagtggattcgcgtttatggtgaaagcatttatggtacccgcggcggttatctgccgctgcagaaatggggcgcagtgacccagaaaagcggtaaaatttatgtgcatattctgaaaaacaacgagggtaaagccattaccctggaaaaatttccgtttaaaaagattaacagcgcatatctgctgaaagataaaaaaaccgtgaaatataccctgaaaaacaataccctgacctttgatagttatgccgttgatgatcagaatccggatgccgtgattgtgtttgaaggcaagggatccgaggagaagactgttcaaacaggaaagacagatcagcaggttggtgctaaattggtacaggaaatccgtgaaggaaaacgcggaccactatatgctggttattttaggacatggcatgatcgtgcttcaacaggaatagatggtaaacagcaacatccagaaaatactatggctgaggtcccaaaagaagttgatatcttatttgtttttcatgaccatacagcttcagatagtccattttggtctgaattaaaggacagttatgtccataaattacatcaacagggaacggcacttgttcagacaattggtgttaacgaattaaatggacgtacaggtttatctaaagattatcctgatactcctgaggggaacaaagctttagcagcagccattgtcaaggcatttgtaactgatcgtggtgtcgatggactagatattgatattgagcacgaatttacgaacaaaagaacacctgaagaagatgctcgtgctctaaatgtttttaaagagattgcgcagttaataggtaaaaatggtagtgataaatctaaattgctcatcatggacactaccctaagtgttgaaaataatccaatatttaaagggatagcggaagatcttgattatcttcttagacaatattatggttcacaaggtggagaagctgaagtggatactataaactctgattggaaccaatatcagaattatattgatgctagccagttcatgattggattctccttttttgaagaatctgcgtccaaagggaatttatggtttgatgttaacgaatacgaccctaacaatcctgaaaaagggaaagatattgaaggaacacgtgctaaaaaatatgcagagtggcaacctagtacaggtggtttaaaagcaggtatattctcttatgctattgatcgtgatggagtggctcatgttccttcaacatataaaaataggactagtacaaatttacaacggcatgaagtcgataatatctcacatactgactacaccgtatctcgaaaattaaaaacattgatgaccgaagacaaacgctatgatgtcattgatcaaaaagacattcctgacccagcattaagagaacaaatcattcaacaagttggacagtataaaggcgatttggaacgttataacaagacattggtgcttacaggagataagattcaaaatcttaaaggactagaaaaattaagcaagttacaaaaattagagttgcgccagctatctaacgttaaagaaattactccagaacttttgccggaaagcatgaaaaaagatgctgagcttgttatggtaggcatgactggtttagaaaaactaaaccttagtggtctaaatcgtcaaactttagacggtatagacgtgaatagtattacgcatttgacatcatttgatatttcacataatagtttggacttgtcggaaaagagtgaagaccgtaaactattaatgactttgatggagcaggtttcaaatcatcaaaaaataacggtgaaaaatacggcttttgaaaatcaaaaaccgaaaggttattatcctcagacgtatgataccaaagaaggtcattatgatgttgataatgcagaacatgatattttaactgattttgtttttggaactgttactaaacgtaatacctttattggagacgaagaagcatttgctatctataaagaaggagctgtcgatggtcgacaatatgtgtctaaagactatacttatgaagcttttcgtaaagactataaaggttacaaggttcatttaactgcttctaacctaggagaaacagttacttctaaggtaactgctactactgatgaaacttacttagtagatgtttctgatggggaaaaagttgttcaccacatgaaactcaatataggatctggtgccatcatgatggaaaatctggcaaaaggggctaaagtgattggtacatctggggactttgagcaagcaaagaagattttcgatggtgaaaagtcagatagattcttcacttggggacaaactaactggatagcttttgatctaggagaaattaatcttgcgaaggaatggcgtttatttaatgcagagacaaatactgaaataaagacagatagtagcttaaacgtggctaaaggacgtcttcagattttaaaagatacaactattgatttagaaaaaatggacataaaaaatcgtaaagagtatctgtcgaatgatgaaaattggactgatgttgctcagatggatgatgcaaaagcgatatttaatagtaaattatccaatgttttatctcggtattggcggttttgtgtagatggtggagctagctcttattaccctcaatataccgaacttcaaatcctcggacaacgtttatcaaatgatgtcgctaatacgctgaaggattaa

SEQ ID NO: 198 - protein, 1257 aa, Artificial Sequence
  SYNTHETIC FUSION PROTEN
MGSSHHHHHHSSGLVPRGSHMFSQQKYQPTQANLKARTEFQDEKFGMFIHFGLYSELGRGEWVMNNDKIPVNDYAKLKDFFNPIGFNAKEYVSMAKNAGVKYITLVTRHHDGFSMWNTKYSDFNIMNTPFKRDLVKELANECHKQGVKIAFYYSLLDWTRTDYSYWTGRTGKGTGRTEKGNWNDYIQFMKNQLTELLTNYGEVSGIWFDGYWDQMEEEKAGRSEKTYIDWKMPEIYELIHKLQPQCLVGNNHHITPLEGEDFQMFERDIPGQNEHGLSFQKPSQLPLETCATLNDSWGFDLKDNKNKTFKEFLNLLVNAAGSNANLLMNIGPMPNGKVPQPFINSFKEMGEWIRVYGESIYGTRGGYLPLQKWGAVTQKSGKIYVHILKNNEGKAITLEKFPFKKINSAYLLKDKKTVKYTLKNNTLTFDSYAVDDQNPDAVIVFEGKGSEEKTVQTGKTDQQVGAKLVQEIREGKRGPLYAGYFRTWHDRASTGIDGKQQHPENTMAEVPKEVDILFVFHDHTASDSPFWSELKDSYVHKLHQQGTALVQTIGVNELNGRTGLSKDYPDTPEGNKALAAAIVKAFVTDRGVDGLDIDIEHEFTNKRTPEEDARALNVFKEIAQLIGKNGSDKSKLLIMDTTLSVENNPIFKGIAEDLDYLLRQYYGSQGGEAEVDTINSDWNQYQNYIDASQFMIGFSFFEESASKGNLWFDVNEYDPNNPEKGKDIEGTRAKKYAEWQPSTGGLKAGIFSYAIDRDGVAHVPSTYKNRTSTNLQRHEVDNISHTDYTVSRKLKTLMTEDKRYDVIDQKDIPDPALREQIIQQVGQYKGDLERYNKTLVLTGDKIQNLKGLEKLSKLQKLELRQLSNVKEITPELLPESMKKDAELVMVGMTGLEKLNLSGLNRQTLDGIDVNSITHLTSFDISHNSLDLSEKSEDRKLLMTLMEQVSNHQKITVKNTAFENQKPKGYYPQTYDTKEGHYDVDNAEHDILTDFVFGTVTKRNTFIGDEEAFAIYKEGAVDGRQYVSKDYTYEAFRKDYKGYKVHLTASNLGETVTSKVTATTDETYLVDVSDGEKVVHHMKLNIGSGAIMMENLAKGAKVIGTSGDFEQAKKIFDGEKSDRFFTWGQTNWIAFDLGEINLAKEWRLFNAETNTEIKTDSSLNVAKGRLQILKDTTIDLEKMDIKNRKEYLSNDENWTDVAQMDDAKAIFNSKLSNVLSRYWRFCVDGGASSYYPQYTELQILGQRLSNDVANTLKD

SEQ ID NO: 199 - DNA, 3774 bp, Artificial Sequence
  SYNTHETIC FUSION PROTEN
atgggcagcagccatcatcatcatcatcacagcagcggcctggtgccgcgcggcagccatatgtttagtcagcagaaatatcagccgacccaggcaaatctgaaagcacgtaccgaatttcaggatgaaaaatttggtatgttcatccatttcggcctgtatagcgaactgggtcgtggcgaatgggttatgaataatgataaaattccggttaacgactacgcaaaactgaaagatttttttaacccgattggctttaacgcaaaagaatatgtgagcatggcaaaaaatgcaggtgttaaatatatcaccctggtgacccgtcatcatgatggttttagcatgtggaataccaaatatagcgattttaacatcatgaacaccccgtttaaacgcgatctggttaaagaactggcaaatgaatgccataaacagggcgtgaaaattgccttttattatagcctgctggattggacccgtaccgattatagttattggaccggccgcaccggtaaaggtaccggccgtaccgaaaaaggtaattggaatgattatatccagttcatgaagaatcagctgaccgaactgctgaccaattatggcgaagttagcggtatttggtttgatggctattgggatcagatggaagaagaaaaagccggtcgtagtgaaaaaacctatattgattggaaaatgccggaaatttacgaactgattcataaactgcagccgcagtgtctggtgggtaataatcatcatattaccccgctggaaggcgaagattttcagatgtttgaacgcgatattccgggccagaatgaacatggtctgagttttcagaaaccgagccagctgccgctggaaacctgcgcaaccctgaatgatagttggggctttgatctgaaagataataaaaataagaccttcaaggagttcctgaatctgctggtgaatgccgcaggtagtaatgccaatctgctgatgaatattggcccgatgccgaatggtaaagttccgcagccgtttattaatagctttaaagaaatgggcgagtggattcgcgtttatggtgaaagcatttatggtacccgcggcggttatctgccgctgcagaaatggggcgcagtgacccagaaaagcggtaaaatttatgtgcatattctgaaaaacaacgagggtaaagccattaccctggaaaaatttccgtttaaaaagattaacagcgcatatctgctgaaagataaaaaaaccgtgaaatataccctgaaaaacaataccctgacctttgatagttatgccgttgatgatcagaatccggatgccgtgattgtgtttgaaggcaagggatccgaggagaagactgttcaaacaggaaagacagatcagcaggttggtgctaaattggtacaggaaatccgtgaaggaaaacgcggaccactatatgctggttattttaggacatggcatgatcgtgcttcaacaggaatagatggtaaacagcaacatccagaaaatactatggctgaggtcccaaaagaagttgatatcttatttgtttttcatgaccatacagcttcagatagtccattttggtctgaattaaaggacagttatgtccataaattacatcaacagggaacggcacttgttcaggaaattggtgttaacgaattaaatggacgtacaggtttatctaaagattatcctgatactcctgaggggaacaaagctttagcagcagccattgtcaaggcatttgtaactgatcgtggtgtcgatggactagatattgatattgagcacgaatttacgaacaaaagaacacctgaagaagatgctcgtgctctaaatgtttttaaagagattgcgcagttaataggtaaaaatggtagtgataaatctaaattgctcatcatggacactaccctaagtgttgaaaataatccaatatttaaagggatagcggaagatcttgattatcttcttagacaatattatggttcacaaggtggagaagctgaagtggatactataaactctgattggaaccaatatcagaattatattgatgctagccagttcatgattggattctccttttttgaagaatctgcgtccaaagggaatttatggtttgatgttaacgaatacgaccctaacaatcctgaaaaagggaaagatattgaaggaacacgtgctaaaaaatatgcagagtggcaacctagtacaggtggtttaaaagcaggtatattctcttatgctattgatcgtgatggagtggctcatgttccttcaacatataaaaataggactagtacaaatttacaacggcatgaagtcgataatatctcacatactgactacaccgtatctcgaaaattaaaaacattgatgaccgaagacaaacgctatgatgtcattgatcaaaaagacattcctgacccagcattaagagaacaaatcattcaacaagttggacagtataaaggcgatttggaacgttataacaagacattggtgcttacaggagataagattcaaaatcttaaaggactagaaaaattaagcaagttacaaaaattagagttgcgccagctatctaacgttaaagaaattactccagaacttttgccggaaagcatgaaaaaagatgctgagcttgttatggtaggcatgactggtttagaaaaactaaaccttagtggtctaaatcgtcaaactttagacggtatagacgtgaatagtattacgcatttgacatcatttgatatttcacataatagtttggacttgtcggaaaagagtgaagaccgtaaactattaatgactttgatggagcaggtttcaaatcatcaaaaaataacggtgaaaaatacggcttttgaaaatcaaaaaccgaaaggttattatcctcagacgtatgataccaaagaaggtcattatgatgttgataatgcagaacatgatattttaactgattttgtttttggaactgttactaaacgtaatacctttattggagacgaagaagcatttgctatctataaagaaggagctgtcgatggtcgacaatatgtgtctaaagactatacttatgaagcttttcgtaaagactataaaggttacaaggttcatttaactgcttctaacctaggagaaacagttacttctaaggtaactgctactactgatgaaacttacttagtagatgtttctgatggggaaaaagttgttcaccacatgaaactcaatataggatctggtgccatcatgatggaaaatctggcaaaaggggctaaagtgattggtacatctggggactttgagcaagcaaagaagattttcgatggtgaaaagtcagatagattcttcacttggggacaaactaactggatagcttttgatctaggagaaattaatcttgcgaaggaatggcgtttatttaatgcagagacaaatactgaaataaagacagatagtagcttaaacgtggctaaaggacgtcttcagattttaaaagatacaactattgatttagaaaaaatggacataaaaaatcgtaaagagtatctgtcgaatgatgaaaattggactgatgttgctcagatggatgatgcaaaagcgatatttaatagtaaattatccaatgttttatctcggtattggcggttttgtgtagatggtggagctagctcttattaccctcaatataccgaacttcaaatcctcggacaacgtttatcaaatgatgtcgctaatacgctgaaggattaa

SEQ ID NO: 200 - protein, 1257 aa, Artificial Sequence
  SYNTHETIC FUSION PROTEN
MGSSHHHHHHSSGLVPRGSHMFSQQKYQPTQANLKARTEFQDEKFGMFIHFGLYSELGRGEWVMNNDKIPVNDYAKLKDFFNPIGFNAKEYVSMAKNAGVKYITLVTRHHDGFSMWNTKYSDFNIMNTPFKRDLVKELANECHKQGVKIAFYYSLLDWTRTDYSYWTGRTGKGTGRTEKGNWNDYIQFMKNQLTELLTNYGEVSGIWFDGYWDQMEEEKAGRSEKTYIDWKMPEIYELIHKLQPQCLVGNNHHITPLEGEDFQMFERDIPGQNEHGLSFQKPSQLPLETCATLNDSWGFDLKDNKNKTFKEFLNLLVNAAGSNANLLMNIGPMPNGKVPQPFINSFKEMGEWIRVYGESIYGTRGGYLPLQKWGAVTQKSGKIYVHILKNNEGKAITLEKFPFKKINSAYLLKDKKTVKYTLKNNTLTFDSYAVDDQNPDAVIVFEGKGSEEKTVQTGKTDQQVGAKLVQEIREGKRGPLYAGYFRTWHDRASTGIDGKQQHPENTMAEVPKEVDILFVFHDHTASDSPFWSELKDSYVHKLHQQGTALVQEIGVNELNGRTGLSKDYPDTPEGNKALAAAIVKAFVTDRGVDGLDIDIEHEFTNKRTPEEDARALNVFKEIAQLIGKNGSDKSKLLIMDTTLSVENNPIFKGIAEDLDYLLRQYYGSQGGEAEVDTINSDWNQYQNYIDASQFMIGFSFFEESASKGNLWFDVNEYDPNNPEKGKDIEGTRAKKYAEWQPSTGGLKAGIFSYAIDRDGVAHVPSTYKNRTSTNLQRHEVDNISHTDYTVSRKLKTLMTEDKRYDVIDQKDIPDPALREQIIQQVGQYKGDLERYNKTLVLTGDKIQNLKGLEKLSKLQKLELRQLSNVKEITPELLPESMKKDAELVMVGMTGLEKLNLSGLNRQTLDGIDVNSITHLTSFDISHNSLDLSEKSEDRKLLMTLMEQVSNHQKITVKNTAFENQKPKGYYPQTYDTKEGHYDVDNAEHDILTDFVFGTVTKRNTFIGDEEAFAIYKEGAVDGRQYVSKDYTYEAFRKDYKGYKVHLTASNLGETVTSKVTATTDETYLVDVSDGEKVVHHMKLNIGSGAIMMENLAKGAKVIGTSGDFEQAKKIFDGEKSDRFFTWGQTNWIAFDLGEINLAKEWRLFNAETNTEIKTDSSLNVAKGRLQILKDTTIDLEKMDIKNRKEYLSNDENWTDVAQMDDAKAIFNSKLSNVLSRYWRFCVDGGASSYYPQYTELQILGQRLSNDVANTLKD

SEQ ID NO: 201 - DNA, 3774 bp, Artificial Sequence
  SYNTHETIC FUSION PROTEN
atgggcagcagccatcatcatcatcatcacagcagcggcctggtgccgcgcggcagccatatgtttagtcagcagaaatatcagccgacccaggcaaatctgaaagcacgtaccgaatttcaggatgaaaaatttggtatgttcatccatttcggcctgtatagcgaactgggtcgtggcgaatgggttatgaataatgataaaattccggttaacgactacgcaaaactgaaagatttttttaacccgattggctttaacgcaaaagaatatgtgagcatggcaaaaaatgcaggtgttaaatatatcaccctggtgacccgtcatcatgatggttttagcatgtggaataccaaatatagcgattttaacatcatgaacaccccgtttaaacgcgatctggttaaagaactggcaaatgaatgccataaacagggcgtgaaaattgccttttattatagcctgctggattggacccgtaccgattatagttattggaccggccgcaccggtaaaggtaccggccgtaccgaaaaaggtaattggaatgattatatccagttcatgaagaatcagctgaccgaactgctgaccaattatggcgaagttagcggtatttggtttgatggctattgggatcagatggaagaagaaaaagccggtcgtagtgaaaaaacctatattgattggaaaatgccggaaatttacgaactgattcataaactgcagccgcagtgtctggtgggtaataatcatcatattaccccgctggaaggcgaagattttcagatgtttgaacgcgatattccgggccagaatgaacatggtctgagttttcagaaaccgagccagctgccgctggaaacctgcgcaaccctgaatgatagttggggctttgatctgaaagataataaaaataagaccttcaaggagttcctgaatctgctggtgaatgccgcaggtagtaatgccaatctgctgatgaatattggcccgatgccgaatggtaaagttccgcagccgtttattaatagctttaaagaaatgggcgagtggattcgcgtttatggtgaaagcatttatggtacccgcggcggttatctgccgctgcagaaatggggcgcagtgacccagaaaagcggtaaaatttatgtgcatattctgaaaaacaacgagggtaaagccattaccctggaaaaatttccgtttaaaaagattaacagcgcatatctgctgaaagataaaaaaaccgtgaaatataccctgaaaaacaataccctgacctttgatagttatgccgttgatgatcagaatccggatgccgtgattgtgtttgaaggcaagggatccgaggagaagactgttcaaacaggaaagacagatcagcaggttggtgctaaattggtacaggaaatccgtgaaggaaaacgcggaccactatatgctggttattttaggacatggcatgatcgtgcttcaacaggaatagatggtaaacagcaacatccagaaaatactatggctgaggtcccaaaagaagttgatatcttatttgtttttcatgaccatacagcttcagatagtccattttggtctgaattaaaggacagttatgtccataaattacatcaacagggaacggcacttgttcagatgattggtgttaacgaattaaatggacgtacaggtttatctaaagattatcctgatactcctgaggggaacaaagctttagcagcagccattgtcaaggcatttgtaactgatcgtggtgtcgatggactagatattgatattgagcacgaatttacgaacaaaagaacacctgaagaagatgctcgtgctctaaatgtttttaaagagattgcgcagttaataggtaaaaatggtagtgataaatctaaattgctcatcatggacactaccctaagtgttgaaaataatccaatatttaaagggatagcggaagatcttgattatcttcttagacaatattatggttcacaaggtggagaagctgaagtggatactataaactctgattggaaccaatatcagaattatattgatgctagccagttcatgattggattctccttttttgaagaatctgcgtccaaagggaatttatggtttgatgttaacgaatacgaccctaacaatcctgaaaaagggaaagatattgaaggaacacgtgctaaaaaatatgcagagtggcaacctagtacaggtggtttaaaagcaggtatattctcttatgctattgatcgtgatggagtggctcatgttccttcaacatataaaaataggactagtacaaatttacaacggcatgaagtcgataatatctcacatactgactacaccgtatctcgaaaattaaaaacattgatgaccgaagacaaacgctatgatgtcattgatcaaaaagacattcctgacccagcattaagagaacaaatcattcaacaagttggacagtataaaggcgatttggaacgttataacaagacattggtgcttacaggagataagattcaaaatcttaaaggactagaaaaattaagcaagttacaaaaattagagttgcgccagctatctaacgttaaagaaattactccagaacttttgccggaaagcatgaaaaaagatgctgagcttgttatggtaggcatgactggtttagaaaaactaaaccttagtggtctaaatcgtcaaactttagacggtatagacgtgaatagtattacgcatttgacatcatttgatatttcacataatagtttggacttgtcggaaaagagtgaagaccgtaaactattaatgactttgatggagcaggtttcaaatcatcaaaaaataacggtgaaaaatacggcttttgaaaatcaaaaaccgaaaggttattatcctcagacgtatgataccaaagaaggtcattatgatgttgataatgcagaacatgatattttaactgattttgtttttggaactgttactaaacgtaatacctttattggagacgaagaagcatttgctatctataaagaaggagctgtcgatggtcgacaatatgtgtctaaagactatacttatgaagcttttcgtaaagactataaaggttacaaggttcatttaactgcttctaacctaggagaaacagttacttctaaggtaactgctactactgatgaaacttacttagtagatgtttctgatggggaaaaagttgttcaccacatgaaactcaatataggatctggtgccatcatgatggaaaatctggcaaaaggggctaaagtgattggtacatctggggactttgagcaagcaaagaagattttcgatggtgaaaagtcagatagattcttcacttggggacaaactaactggatagcttttgatctaggagaaattaatcttgcgaaggaatggcgtttatttaatgcagagacaaatactgaaataaagacagatagtagcttaaacgtggctaaaggacgtcttcagattttaaaagatacaactattgatttagaaaaaatggacataaaaaatcgtaaagagtatctgtcgaatgatgaaaattggactgatgttgctcagatggatgatgcaaaagcgatatttaatagtaaattatccaatgttttatctcggtattggcggttttgtgtagatggtggagctagctcttattaccctcaatataccgaacttcaaatcctcggacaacgtttatcaaatgatgtcgctaatacgctgaaggattaa

SEQ ID NO: 202 - protein, 1257 aa, Artificial Sequence
  SYNTHETIC FUSION PROTEN
MGSSHHHHHHSSGLVPRGSHMFSQQKYQPTQANLKARTEFQDEKFGMFIHFGLYSELGRGEWVMNNDKIPVNDYAKLKDFFNPIGFNAKEYVSMAKNAGVKYITLVTRHHDGFSMWNTKYSDFNIMNTPFKRDLVKELANECHKQGVKIAFYYSLLDWTRTDYSYWTGRTGKGTGRTEKGNWNDYIQFMKNQLTELLTNYGEVSGIWFDGYWDQMEEEKAGRSEKTYIDWKMPEIYELIHKLQPQCLVGNNHHITPLEGEDFQMFERDIPGQNEHGLSFQKPSQLPLETCATLNDSWGFDLKDNKNKTFKEFLNLLVNAAGSNANLLMNIGPMPNGKVPQPFINSFKEMGEWIRVYGESIYGTRGGYLPLQKWGAVTQKSGKIYVHILKNNEGKAITLEKFPFKKINSAYLLKDKKTVKYTLKNNTLTFDSYAVDDQNPDAVIVFEGKGSEEKTVQTGKTDQQVGAKLVQEIREGKRGPLYAGYFRTWHDRASTGIDGKQQHPENTMAEVPKEVDILFVFHDHTASDSPFWSELKDSYVHKLHQQGTALVQMIGVNELNGRTGLSKDYPDTPEGNKALAAAIVKAFVTDRGVDGLDIDIEHEFTNKRTPEEDARALNVFKEIAQLIGKNGSDKSKLLIMDTTLSVENNPIFKGIAEDLDYLLRQYYGSQGGEAEVDTINSDWNQYQNYIDASQFMIGFSFFEESASKGNLWFDVNEYDPNNPEKGKDIEGTRAKKYAEWQPSTGGLKAGIFSYAIDRDGVAHVPSTYKNRTSTNLQRHEVDNISHTDYTVSRKLKTLMTEDKRYDVIDQKDIPDPALREQIIQQVGQYKGDLERYNKTLVLTGDKIQNLKGLEKLSKLQKLELRQLSNVKEITPELLPESMKKDAELVMVGMTGLEKLNLSGLNRQTLDGIDVNSITHLTSFDISHNSLDLSEKSEDRKLLMTLMEQVSNHQKITVKNTAFENQKPKGYYPQTYDTKEGHYDVDNAEHDILTDFVFGTVTKRNTFIGDEEAFAIYKEGAVDGRQYVSKDYTYEAFRKDYKGYKVHLTASNLGETVTSKVTATTDETYLVDVSDGEKVVHHMKLNIGSGAIMMENLAKGAKVIGTSGDFEQAKKIFDGEKSDRFFTWGQTNWIAFDLGEINLAKEWRLFNAETNTEIKTDSSLNVAKGRLQILKDTTIDLEKMDIKNRKEYLSNDENWTDVAQMDDAKAIFNSKLSNVLSRYWRFCVDGGASSYYPQYTELQILGQRLSNDVANTLKD

SEQ ID NO: 203 - DNA, 3774 bp, Artificial Sequence
  SYNTHETIC FUSION PROTEN
atgggcagcagccatcatcatcatcatcacagcagcggcctggtgccgcgcggcagccatatgtttagtcagcagaaatatcagccgacccaggcaaatctgaaagcacgtaccgaatttcaggatgaaaaatttggtatgttcatccatttcggcctgtatagcgaactgggtcgtggcgaatgggttatgaataatgataaaattccggttaacgactacgcaaaactgaaagatttttttaacccgattggctttaacgcaaaagaatatgtgagcatggcaaaaaatgcaggtgttaaatatatcaccctggtgacccgtcatcatgatggttttagcatgtggaataccaaatatagcgattttaacatcatgaacaccccgtttaaacgcgatctggttaaagaactggcaaatgaatgccataaacagggcgtgaaaattgccttttattatagcctgctggattggacccgtaccgattatagttattggaccggccgcaccggtaaaggtaccggccgtaccgaaaaaggtaattggaatgattatatccagttcatgaagaatcagctgaccgaactgctgaccaattatggcgaagttagcggtatttggtttgatggctattgggatcagatggaagaagaaaaagccggtcgtagtgaaaaaacctatattgattggaaaatgccggaaatttacgaactgattcataaactgcagccgcagtgtctggtgggtaataatcatcatattaccccgctggaaggcgaagattttcagatgtttgaacgcgatattccgggccagaatgaacatggtctgagttttcagaaaccgagccagctgccgctggaaacctgcgcaaccctgaatgatagttggggctttgatctgaaagataataaaaataagaccttcaaggagttcctgaatctgctggtgaatgccgcaggtagtaatgccaatctgctgatgaatattggcccgatgccgaatggtaaagttccgcagccgtttattaatagctttaaagaaatgggcgagtggattcgcgtttatggtgaaagcatttatggtacccgcggcggttatctgccgctgcagaaatggggcgcagtgacccagaaaagcggtaaaatttatgtgcatattctgaaaaacaacgagggtaaagccattaccctggaaaaatttccgtttaaaaagattaacagcgcatatctgctgaaagataaaaaaaccgtgaaatataccctgaaaaacaataccctgacctttgatagttatgccgttgatgatcagaatccggatgccgtgattgtgtttgaaggcaagggatccgaggagaagactgttcaaacaggaaagacagatcagcaggttggtgctaaattggtacaggaaatccgtgaaggaaaacgcggaccactatatgctggttattttaggacatggcatgatcgtgcttcaacaggaatagatggtaaacagcaacatccagaaaatactatggctgaggtcccaaaagaagttgatatcttatttgtttttcatgaccatacagcttcagatagtccattttggtctgaattaaaggacagttatgtccataaattacatcaacagggaacggcacttgttcagacaattggtgttaacgaattaaatggacgtacaggtttatctaaagattatcctgatactcctgaggggaacaaagctttagcagcagccattgtcaaggcatttgtaactgatcgtggtgtcgatggactagatattatgattgagcacgaatttacgaacaaaagaacacctgaagaagatgctcgtgctctaaatgtttttaaagagattgcgcagttaataggtaaaaatggtagtgataaatctaaattgctcatcatggacactaccctaagtgttgaaaataatccaatatttaaagggatagcggaagatcttgattatcttcttagacaatattatggttcacaaggtggagaagctgaagtggatactataaactctgattggaaccaatatcagaattatattgatgctagccagttcatgattggattctccttttttgaagaatctgcgtccaaagggaatttatggtttgatgttaacgaatacgaccctaacaatcctgaaaaagggaaagatattgaaggaacacgtgctaaaaaatatgcagagtggcaacctagtacaggtggtttaaaagcaggtatattctcttatgctattgatcgtgatggagtggctcatgttccttcaacatataaaaataggactagtacaaatttacaacggcatgaagtcgataatatctcacatactgactacaccgtatctcgaaaattaaaaacattgatgaccgaagacaaacgctatgatgtcattgatcaaaaagacattcctgacccagcattaagagaacaaatcattcaacaagttggacagtataaaggcgatttggaacgttataacaagacattggtgcttacaggagataagattcaaaatcttaaaggactagaaaaattaagcaagttacaaaaattagagttgcgccagctatctaacgttaaagaaattactccagaacttttgccggaaagcatgaaaaaagatgctgagcttgttatggtaggcatgactggtttagaaaaactaaaccttagtggtctaaatcgtcaaactttagacggtatagacgtgaatagtattacgcatttgacatcatttgatatttcacataatagtttggacttgtcggaaaagagtgaagaccgtaaactattaatgactttgatggagcaggtttcaaatcatcaaaaaataacggtgaaaaatacggcttttgaaaatcaaaaaccgaaaggttattatcctcagacgtatgataccaaagaaggtcattatgatgttgataatgcagaacatgatattttaactgattttgtttttggaactgttactaaacgtaatacctttattggagacgaagaagcatttgctatctataaagaaggagctgtcgatggtcgacaatatgtgtctaaagactatacttatgaagcttttcgtaaagactataaaggttacaaggttcatttaactgcttctaacctaggagaaacagttacttctaaggtaactgctactactgatgaaacttacttagtagatgtttctgatggggaaaaagttgttcaccacatgaaactcaatataggatctggtgccatcatgatggaaaatctggcaaaaggggctaaagtgattggtacatctggggactttgagcaagcaaagaagattttcgatggtgaaaagtcagatagattcttcacttggggacaaactaactggatagcttttgatctaggagaaattaatcttgcgaaggaatggcgtttatttaatgcagagacaaatactgaaataaagacagatagtagcttaaacgtggctaaaggacgtcttcagattttaaaagatacaactattgatttagaaaaaatggacataaaaaatcgtaaagagtatctgtcgaatgatgaaaattggactgatgttgctcagatggatgatgcaaaagcgatatttaatagtaaattatccaatgttttatctcggtattggcggttttgtgtagatggtggagctagctcttattaccctcaatataccgaacttcaaatcctcggacaacgtttatcaaatgatgtcgctaatacgctgaaggattaa

SEQ ID NO: 204 - protein, 1257 aa, Artificial Sequence
  SYNTHETIC FUSION PROTEN
MGSSHHHHHHSSGLVPRGSHMFSQQKYQPTQANLKARTEFQDEKFGMFIHFGLYSELGRGEWVMNNDKIPVNDYAKLKDFFNPIGFNAKEYVSMAKNAGVKYITLVTRHHDGFSMWNTKYSDFNIMNTPFKRDLVKELANECHKQGVKIAFYYSLLDWTRTDYSYWTGRTGKGTGRTEKGNWNDYIQFMKNQLTELLTNYGEVSGIWFDGYWDQMEEEKAGRSEKTYIDWKMPEIYELIHKLQPQCLVGNNHHITPLEGEDFQMFERDIPGQNEHGLSFQKPSQLPLETCATLNDSWGFDLKDNKNKTFKEFLNLLVNAAGSNANLLMNIGPMPNGKVPQPFINSFKEMGEWIRVYGESIYGTRGGYLPLQKWGAVTQKSGKIYVHILKNNEGKAITLEKFPFKKINSAYLLKDKKTVKYTLKNNTLTFDSYAVDDQNPDAVIVFEGKGSEEKTVQTGKTDQQVGAKLVQEIREGKRGPLYAGYFRTWHDRASTGIDGKQQHPENTMAEVPKEVDILFVFHDHTASDSPFWSELKDSYVHKLHQQGTALVQTIGVNELNGRTGLSKDYPDTPEGNKALAAAIVKAFVTDRGVDGLDIMIEHEFTNKRTPEEDARALNVFKEIAQLIGKNGSDKSKLLIMDTTLSVENNPIFKGIAEDLDYLLRQYYGSQGGEAEVDTINSDWNQYQNYIDASQFMIGFSFFEESASKGNLWFDVNEYDPNNPEKGKDIEGTRAKKYAEWQPSTGGLKAGIFSYAIDRDGVAHVPSTYKNRTSTNLQRHEVDNISHTDYTVSRKLKTLMTEDKRYDVIDQKDIPDPALREQIIQQVGQYKGDLERYNKTLVLTGDKIQNLKGLEKLSKLQKLELRQLSNVKEITPELLPESMKKDAELVMVGMTGLEKLNLSGLNRQTLDGIDVNSITHLTSFDISHNSLDLSEKSEDRKLLMTLMEQVSNHQKITVKNTAFENQKPKGYYPQTYDTKEGHYDVDNAEHDILTDFVFGTVTKRNTFIGDEEAFAIYKEGAVDGRQYVSKDYTYEAFRKDYKGYKVHLTASNLGETVTSKVTATTDETYLVDVSDGEKVVHHMKLNIGSGAIMMENLAKGAKVIGTSGDFEQAKKIFDGEKSDRFFTWGQTNWIAFDLGEINLAKEWRLFNAETNTEIKTDSSLNVAKGRLQILKDTTIDLEKMDIKNRKEYLSNDENWTDVAQMDDAKAIFNSKLSNVLSRYWRFCVDGGASSYYPQYTELQILGQRLSNDVANTLKD

What is claimed is:

1. A fusion protein comprising a fucosidase or a truncated fragment or a mutant thereof fuses with either N-terminal end or C-terminal end of an endoglycosidase or a truncated fragment or a mutant thereof wherein the fusion protein exhibits both the fucosidase activity and the endoglycosidase activity.

2. The fusion protein of claim 1, wherein the fucosidase is Lactobacillus casei α-L fucosidase C (Alfc), Bacteroides fragilis fucosidase (BF3242), Bacteroides thetaiotamicron α-L-fucosidase (BT2970), Emticicia oligotrophica α-L-fucosidase (E00918) and Elizabethkingia miricola α-(1-6) fucosidase (Emfuc3), or a fragment thereof, or a mutant thereof.

3. The fusion protein of claim 1, wherein the fucosidase is Lactobacillus casei α-L fucosidase C, Elizabethkingia miricola α-(1-6) fucosidase (Emfuc3), or a truncated fragment or a mutant thereof.

4. The fusion protein of claim 1, wherein the endoglycosidase is Streptococcus pyogenes endoglycosidase S, Streptococcus pyogenes endoglycosidase S2 or a fragment or a mutant thereof.

5. The fusion protein of claim 1, wherein the truncated fragment of endoglycosidase is the IgG binding domain thereof.

6. The fusion protein of claim 1, wherein the truncated fragment of the endoglycosidase is an IgG binding domain of Streptococcus pyogenes endoglycosidase S or Streptococcus pyogenes endoglycosidase S2.

7. The fusion protein of claim 1, wherein the endoglycosidase mutant is Streptococcus pyogenes endoglycosidase S having a mutation at amino acid position D233.

8. The fusion protein of claim 7, wherein the endoglycosidase mutant is Streptococcus pyogenes endoglycosidase S having a mutation at amino acid position D233Q.

9. The fusion protein of claim 1, wherein the endoglycosidase mutant is Streptococcus pyogenes endoglycosidase S2 having a mutation at amino acid position T138, D182, D184, D186, D226, or T227.

10. The fusion protein of claim 1, wherein the endoglycosidase mutant is Streptococcus pyogenes endoglycosidase S2 having a mutation at amino acid position T138E, T138M, T138Q, T138R, T138 M, T138L, T138H, T138N, T138K, D182Q, D184M, D184Q, D184T, D184L, D184F, D184S, D184V, D184K, D184W, E186A, D226Q, or T227Q.

11. The fusion protein of claim 1, which comprises Lactobacillus casei α-L fucosidase C fused with Streptococcus pyogenes endoglycosidase S, Streptococcus pyogenes endoglycosidase S2, an IgG binding domain of Streptococcus pyogenes endoglycosidase S, an IgG binding domain of Streptococcus pyogenes endoglycosidase S2, Streptococcus pyogenes endoglycosidase S having a mutation at amino acid position D233, Streptococcus pyogenes endoglycosidase S2 having a mutation at amino acid position T138, Streptococcus pyogenes endoglycosidase S2 having a mutation at amino acid position D182, Streptococcus pyogenes endoglycosidase S2 having a mutation at amino acid position D184, Streptococcus pyogenes endoglycosidase S2 having a mutation at amino acid position D186, Streptococcus pyogenes endoglycosidase S2 having a mutation at amino acid position D226, or Streptococcus pyogenes endoglycosidase S2 having a mutation at amino acid position T227.

12. The fusion protein of claim 1, which comprises Elizabethkingia miricola α-(1-6) fucosidase fused with Streptococcus pyogenes endoglycosidase S, Streptococcus pyogenes endoglycosidase S2, an IgG binding domain of Streptococcus pyogenes endoglycosidase S, an IgG binding domain of Streptococcus pyogenes endoglycosidase S2, Streptococcus pyogenes endoglycosidase S having a mutation at amino acid position D233, Streptococcus pyogenes endoglycosidase S2 having a mutation at amino acid position T138, Streptococcus pyogenes endoglycosidase S2 having a mutation at amino acid position D182, Streptococcus pyogenes endoglycosidase S2 having a mutation at amino acid position D184, Streptococcus pyogenes endoglycosidase S2 having a mutation at amino acid position D186, Streptococcus pyogenes endoglycosidase S2 having a mutation at amino acid position D226 or Streptococcus pyogenes endoglycosidase S2 having a mutation at amino acid position T227.

13. The fusion protein of claim 1, which comprises an amino acid sequence selected from SEQ ID NOs: 2, 4, 6, 8, 10, 12, 14, 16, 18, 20, 22, 24, 26, 28, 30, 32, 34, 36, 38, 40, 42, 44, 46, 48, 50, 52, 54, 56, 58, 60, 62, 64, 66, 68, 70, 72, 74, 76, 78, 80, 82, 84, 86, 88, 90, 92, 94, 96, 98, 100, 102, 104, 106, 108, 110, 112, 114, 116, 118, 120, 122, 124, 126, 128, 130, 132, 134, 136, 138, 140, 142, 144, 146, 148, 150, 152, 154, 156, 158, 160, 162, 164, 166, 168, 170, 172, 174, 176, 178, 180, 182, 184, 186, 188, 190, 192, 194, 196, 198, 200, 202, and 204, or a substantially similar sequence thereof.

14. The fusion protein of claim 1, which comprises an amino acid sequence selected from the group consisting of SEQ ID NOs: 34, 36, 38, 40, 42, 44, 46, 48, 50, 52, 54, 56, 58, 60, 62, 64, 66, 68, 70, 72, 74, 76, 78, 80, 82, 84, 86, 88, 90, 92, 94, 96, 98, 100, 102, 104, 106, 108, 174, 176, 178, 180, 182, 184, 186, 188, 190, 192, 194, 196, 198, 200, 202, and 204, or a substantially similar sequence thereof.

15. A nucleic acid molecule expressing the fusion protein of claim 1.

16. The nucleic acid molecule of claim 15, comprising a nucleotide sequence selected from the group consisting of SEQ ID NOs: 1, 3, 5, 7, 9, 11, 13, 15, 17, 19, 21, 23, 25, 27, 29, 31, 33, 35, 37, 39, 41, 43, 45, 47, 49, 51, 53, 55, 57, 59, 61, 63, 65, 67, 69, 71, 73, 75, 77, 79, 81, 83, 85, 87, 89, 91, 93, 95, 97, 99, 101, 103, 105, 107, 109, 111, 113, 115, 117, 119, 121, 123, 125, 127, 129, 131, 133, 135, 137, 139, 141, 143, 145, 147, 149, 151, 153, 155, 157, 159, 161, 163, 165, 167, 169, 171, 173, 175, 177, 179, 181, 183, 185, 187, 189, 191, 193, 195, 197, 199, 201, and 203, or a substantially identical sequence thereof.

17. A vector comprising a nucleic acid molecule of claim 15.

18. A method for remodeling a glycan of an antibody Fc region comprising the following steps: obtaining an antibody that has a heterogeneous glycan in the Fc region of the antibody and contacting the antibody with the fusion protein of claim 1.

19. The method of claim 18, comprising
providing an antibody having a heterogeneous glycan in the Fc region thereof, a fusion protein of claim 1 and a target glycan oxazoline, wherein the glycan of the antibody Fc region comprises a N-acetylglucosamine (GlcNAc) residue; and
contacting the antibody with the fusion protein of claim 1 and the target glycan oxazoline linking to the antibody Fc region;
whereby a remodeled glycan of the antibody Fc region can be obtained.

20. The method of claim 17, which further comprises purifying the antibody having the remodeled glycan in the Fc region.

21. The method of claim 18, wherein the remodeled glycan is Sia₂(α2-6)Gal₂GlcNAc₂Man₃GlcNAc₂, Sia₂(α2-6)Gal₂GlcNAc₃Man₃GlcNAc₂, Sia₂(α2-3)Gal₂GlcNAc₂Man₃GlcNAc₂, Sia₂(α2-3)Gal₂GlcNAc₃Man₃GlcNAc₂, Sia₂(α2-3/α2-6)Gal₂GlcNAc₂Man₃GlcNAc₂, Sia₂(α2-6/α2-3)Gal₂GlcNAc₂Man₃GlcNAc₂, Sia₂(α2-3/α2-6)Gal₂GlcNAc₃Man₃GlcNAc₂, Sia₂(α2-6/α2-3)Gal₂GlcNAc₃Man₃GlcNAc₂, Sia(α2-6)Gal₂GlcNAc₂Man₃GlcNAc₂, Sia(α2-3)Gal₂GlcNAc₂Man₃GlcNAc₂, Sia(α2-6)Gal₂GlcNAc₃Man₃GlcNAc₂, Sia(α2-3)Gal₂GlcNAc₃Man₃GlcNAc₂, Sia(α2-6)GalGlcNAc₂Man₃GlcNAc₂, Sia(α2-3)GalGlcNAc₂Man₃GlcNAc₂, Sia(α2-6)GalGlcNAc₃Man₃GlcNAc₂, Sia(α2-3)GalGlcNAc₃Man₃GlcNAc₂, Gal₂GlcNAc₂Man₃GlcNAc₂, GalGlcNAcMan₃GlcNAc₂, Gal₂GlcNAc₃Man₃GlcNAc₂, GalGlcNAc₂Man₃GlcNAc₂, GalGlcNAc₃Man₃GlcNAc₂, GlcNAc₃Man₃GlcNAc₂, GlcNAc₂Man₃GlcNAc₂, GlcNAcMan₃GlcNAc₂, or Man₃GlcNAc₂.
